United States Patent Application Publication US 2022/0307033 A1 - sequence listing, part 3

SEQ ID NO: 54150 - RNA, 19 nt, Artificial Sequence
  Antisense Oligo
gagacaugcagaagcgaga

SEQ ID NO: 54151 - RNA, 19 nt, Artificial Sequence
  Sense Oligo
ucgcuucugcaugucucau

SEQ ID NO: 54152 - RNA, 19 nt, Artificial Sequence
  Antisense Oligo
augagacaugcagaagcga

SEQ ID NO: 54153 - RNA, 19 nt, Artificial Sequence
  Sense Oligo
uucuuucugguuuaaggac

SEQ ID NO: 54154 - RNA, 19 nt, Artificial Sequence
  Antisense Oligo
guccuuaaaccagaaagaa

SEQ ID NO: 54155 - RNA, 19 nt, Artificial Sequence
  Sense Oligo
cuuucugguuuaaggacac

SEQ ID NO: 54156 - RNA, 19 nt, Artificial Sequence
  Antisense Oligo
guguccuuaaaccagaaag

SEQ ID NO: 54157 - RNA, 19 nt, Artificial Sequence
  Sense Oligo
uuucugguuuaaggacacu

SEQ ID NO: 54158 - RNA, 19 nt, Artificial Sequence
  Antisense Oligo
aguguccuuaaaccagaaa

SEQ ID NO: 54159 - RNA, 19 nt, Artificial Sequence
  Sense Oligo
uucugguuuaaggacacug

SEQ ID NO: 54160 - RNA, 19 nt, Artificial Sequence
  Antisense Oligo
caguguccuuaaaccagaa

SEQ ID NO: 54161 - RNA, 19 nt, Artificial Sequence
  Sense Oligo
ucugguuuaaggacacugu

SEQ ID NO: 54162 - RNA, 19 nt, Artificial Sequence
  Antisense Oligo
acaguguccuuaaaccaga

SEQ ID NO: 54163 - RNA, 19 nt, Artificial Sequence
  Sense Oligo
aucucucucuccauucaau

SEQ ID NO: 54164 - RNA, 19 nt, Artificial Sequence
  Antisense Oligo
auugaauggagagagagau

SEQ ID NO: 54165 - RNA, 19 nt, Artificial Sequence
  Sense Oligo
cucucuccauucaaugaug

SEQ ID NO: 54166 - RNA, 19 nt, Artificial Sequence
  Antisense Oligo
caucauugaauggagagag

SEQ ID NO: 54167 - RNA, 19 nt, Artificial Sequence
  Sense Oligo
ucucuccauucaaugaugu

SEQ ID NO: 54168 - RNA, 19 nt, Artificial Sequence
  Antisense Oligo
acaucauugaauggagaga

SEQ ID NO: 54169 - RNA, 19 nt, Artificial Sequence
  Sense Oligo
cucuccauucaaugauguu

SEQ ID NO: 54170 - RNA, 19 nt, Artificial Sequence
  Antisense Oligo
aacaucauugaauggagag

SEQ ID NO: 54171 - RNA, 19 nt, Artificial Sequence
  Sense Oligo
ucuccauucaaugauguug

SEQ ID NO: 54172 - RNA, 19 nt, Artificial Sequence
  Antisense Oligo
caacaucauugaauggaga

SEQ ID NO: 54173 - RNA, 19 nt, Artificial Sequence
  Sense Oligo
cuccauucaaugauguugu

SEQ ID NO: 54174 - RNA, 19 nt, Artificial Sequence
  Antisense Oligo
acaacaucauugaauggag

SEQ ID NO: 54175 - RNA, 19 nt, Artificial Sequence
  Sense Oligo
uccauucaaugauguugug

SEQ ID NO: 54176 - RNA, 19 nt, Artificial Sequence
  Antisense Oligo
cacaacaucauugaaugga

SEQ ID NO: 54177 - RNA, 19 nt, Artificial Sequence
  Sense Oligo
ccauucaaugauguugugg

SEQ ID NO: 54178 - RNA, 19 nt, Artificial Sequence
  Antisense Oligo
ccacaacaucauugaaugg

SEQ ID NO: 54179 - RNA, 19 nt, Artificial Sequence
  Sense Oligo
cauucaaugauguugugga

SEQ ID NO: 54180 - RNA, 19 nt, Artificial Sequence
  Antisense Oligo
uccacaacaucauugaaug

SEQ ID NO: 54181 - RNA, 19 nt, Artificial Sequence
  Sense Oligo
auucaaugauguuguggau

SEQ ID NO: 54182 - RNA, 19 nt, Artificial Sequence
  Antisense Oligo
auccacaacaucauugaau

SEQ ID NO: 54183 - RNA, 19 nt, Artificial Sequence
  Sense Oligo
uucaaugauguuguggaua

SEQ ID NO: 54184 - RNA, 19 nt, Artificial Sequence
  Antisense Oligo
uauccacaacaucauugaa

SEQ ID NO: 54185 - RNA, 19 nt, Artificial Sequence
  Sense Oligo
ucaaugauguuguggauaa

SEQ ID NO: 54186 - RNA, 19 nt, Artificial Sequence
  Antisense Oligo
uuauccacaacaucauuga

SEQ ID NO: 54187 - RNA, 19 nt, Artificial Sequence
  Sense Oligo
caaugauguuguggauaag

SEQ ID NO: 54188 - RNA, 19 nt, Artificial Sequence
  Antisense Oligo
cuuauccacaacaucauug

SEQ ID NO: 54189 - RNA, 19 nt, Artificial Sequence
  Sense Oligo
aaugauguuguggauaaga

SEQ ID NO: 54190 - RNA, 19 nt, Artificial Sequence
  Antisense Oligo
ucuuauccacaacaucauu

SEQ ID NO: 54191 - RNA, 19 nt, Artificial Sequence
  Sense Oligo
auguuguggauaagacucc

SEQ ID NO: 54192 - RNA, 19 nt, Artificial Sequence
  Antisense Oligo
ggagucuuauccacaacau

SEQ ID NO: 54193 - RNA, 19 nt, Artificial Sequence
  Sense Oligo
uguuguggauaagacuccu

SEQ ID NO: 54194 - RNA, 19 nt, Artificial Sequence
  Antisense Oligo
aggagucuuauccacaaca

SEQ ID NO: 54195 - RNA, 19 nt, Artificial Sequence
  Sense Oligo
guuguggauaagacuccug

SEQ ID NO: 54196 - RNA, 19 nt, Artificial Sequence
  Antisense Oligo
caggagucuuauccacaac

SEQ ID NO: 54197 - RNA, 19 nt, Artificial Sequence
  Sense Oligo
uuguggauaagacuccugu

SEQ ID NO: 54198 - RNA, 19 nt, Artificial Sequence
  Antisense Oligo
acaggagucuuauccacaa

SEQ ID NO: 54199 - RNA, 19 nt, Artificial Sequence
  Sense Oligo
uguggauaagacuccuguc

SEQ ID NO: 54200 - RNA, 19 nt, Artificial Sequence
  Antisense Oligo
gacaggagucuuauccaca

SEQ ID NO: 54201 - RNA, 19 nt, Artificial Sequence
  Sense Oligo
guggauaagacuccuguca

SEQ ID NO: 54202 - RNA, 19 nt, Artificial Sequence
  Antisense Oligo
ugacaggagucuuauccac

SEQ ID NO: 54203 - RNA, 19 nt, Artificial Sequence
  Sense Oligo
auaagacuccugucauccg

SEQ ID NO: 54204 - RNA, 19 nt, Artificial Sequence
  Antisense Oligo
cggaugacaggagucuuau

SEQ ID NO: 54205 - RNA, 19 nt, Artificial Sequence
  Sense Oligo
uaagacuccugucauccgc

SEQ ID NO: 54206 - RNA, 19 nt, Artificial Sequence
  Antisense Oligo
gcggaugacaggagucuua

SEQ ID NO: 54207 - RNA, 19 nt, Artificial Sequence
  Sense Oligo
aagacuccugucauccgcu

SEQ ID NO: 54208 - RNA, 19 nt, Artificial Sequence
  Antisense Oligo
agcggaugacaggagucuu

SEQ ID NO: 54209 - RNA, 19 nt, Artificial Sequence
  Sense Oligo
agacuccugucauccgcuc

SEQ ID NO: 54210 - RNA, 19 nt, Artificial Sequence
  Antisense Oligo
gagcggaugacaggagucu

SEQ ID NO: 54211 - RNA, 19 nt, Artificial Sequence
  Sense Oligo
gacuccugucauccgcuca

SEQ ID NO: 54212 - RNA, 19 nt, Artificial Sequence
  Antisense Oligo
ugagcggaugacaggaguc

SEQ ID NO: 54213 - RNA, 19 nt, Artificial Sequence
  Sense Oligo
acuccugucauccgcucag

SEQ ID NO: 54214 - RNA, 19 nt, Artificial Sequence
  Antisense Oligo
cugagcggaugacaggagu

SEQ ID NO: 54215 - RNA, 19 nt, Artificial Sequence
  Sense Oligo
cuccugucauccgcucagu

SEQ ID NO: 54216 - RNA, 19 nt, Artificial Sequence
  Antisense Oligo
acugagcggaugacaggag

SEQ ID NO: 54217 - RNA, 19 nt, Artificial Sequence
  Sense Oligo
ucauccgcucagugauacu

SEQ ID NO: 54218 - RNA, 19 nt, Artificial Sequence
  Antisense Oligo
aguaucacugagcggauga

SEQ ID NO: 54219 - RNA, 19 nt, Artificial Sequence
  Sense Oligo
aacugcuuuugaaguacag

SEQ ID NO: 54220 - RNA, 19 nt, Artificial Sequence
  Antisense Oligo
cuguacuucaaaagcaguu

SEQ ID NO: 54221 - RNA, 19 nt, Artificial Sequence
  Sense Oligo
gcuuuugaaguacagguaa

SEQ ID NO: 54222 - RNA, 19 nt, Artificial Sequence
  Antisense Oligo
uuaccuguacuucaaaagc

SEQ ID NO: 54223 - RNA, 19 nt, Artificial Sequence
  Sense Oligo
cuuuugaaguacagguaag

SEQ ID NO: 54224 - RNA, 19 nt, Artificial Sequence
  Antisense Oligo
cuuaccuguacuucaaaag

SEQ ID NO: 54225 - RNA, 19 nt, Artificial Sequence
  Sense Oligo
uuuugaaguacagguaaga

SEQ ID NO: 54226 - RNA, 19 nt, Artificial Sequence
  Antisense Oligo
ucuuaccuguacuucaaaa

SEQ ID NO: 54227 - RNA, 19 nt, Artificial Sequence
  Sense Oligo
uuugaaguacagguaagaa

SEQ ID NO: 54228 - RNA, 19 nt, Artificial Sequence
  Antisense Oligo
uucuuaccuguacuucaaa

SEQ ID NO: 54229 - RNA, 19 nt, Artificial Sequence
  Sense Oligo
uuuucucuucaucgcagcg

SEQ ID NO: 54230 - RNA, 19 nt, Artificial Sequence
  Antisense Oligo
cgcugcgaugaagagaaaa

SEQ ID NO: 54231 - RNA, 19 nt, Artificial Sequence
  Sense Oligo
uuucucuucaucgcagcgu

SEQ ID NO: 54232 - RNA, 19 nt, Artificial Sequence
  Antisense Oligo
acgcugcgaugaagagaaa

SEQ ID NO: 54233 - RNA, 19 nt, Artificial Sequence
  Sense Oligo
uucucuucaucgcagcguu

SEQ ID NO: 54234 - RNA, 19 nt, Artificial Sequence
  Antisense Oligo
aacgcugcgaugaagagaa

SEQ ID NO: 54235 - RNA, 19 nt, Artificial Sequence
  Sense Oligo
ucucuucaucgcagcguuu

SEQ ID NO: 54236 - RNA, 19 nt, Artificial Sequence
  Antisense Oligo
aaacgcugcgaugaagaga

SEQ ID NO: 54237 - RNA, 19 nt, Artificial Sequence
  Sense Oligo
cucuucaucgcagcguuuu

SEQ ID NO: 54238 - RNA, 19 nt, Artificial Sequence
  Antisense Oligo
aaaacgcugcgaugaagag

SEQ ID NO: 54239 - RNA, 19 nt, Artificial Sequence
  Sense Oligo
ucuucaucgcagcguuuug

SEQ ID NO: 54240 - RNA, 19 nt, Artificial Sequence
  Antisense Oligo
caaaacgcugcgaugaaga

SEQ ID NO: 54241 - RNA, 19 nt, Artificial Sequence
  Sense Oligo
cuucaucgcagcguuuugu

SEQ ID NO: 54242 - RNA, 19 nt, Artificial Sequence
  Antisense Oligo
acaaaacgcugcgaugaag

SEQ ID NO: 54243 - RNA, 19 nt, Artificial Sequence
  Sense Oligo
cgcagcguuuuguuaccaa

SEQ ID NO: 54244 - RNA, 19 nt, Artificial Sequence
  Antisense Oligo
uugguaacaaaacgcugcg

SEQ ID NO: 54245 - RNA, 19 nt, Artificial Sequence
  Sense Oligo
gcagcguuuuguuaccaag

SEQ ID NO: 54246 - RNA, 19 nt, Artificial Sequence
  Antisense Oligo
cuugguaacaaaacgcugc

SEQ ID NO: 54247 - RNA, 19 nt, Artificial Sequence
  Sense Oligo
cagcguuuuguuaccaagu

SEQ ID NO: 54248 - RNA, 19 nt, Artificial Sequence
  Antisense Oligo
acuugguaacaaaacgcug

SEQ ID NO: 54249 - RNA, 19 nt, Artificial Sequence
  Sense Oligo
agcguuuuguuaccaaguc

SEQ ID NO: 54250 - RNA, 19 nt, Artificial Sequence
  Antisense Oligo
gacuugguaacaaaacgcu

SEQ ID NO: 54251 - RNA, 19 nt, Artificial Sequence
  Sense Oligo
gcguuuuguuaccaagucu

SEQ ID NO: 54252 - RNA, 19 nt, Artificial Sequence
  Antisense Oligo
agacuugguaacaaaacgc

SEQ ID NO: 54253 - RNA, 19 nt, Artificial Sequence
  Sense Oligo
cguuuuguuaccaagucuu

SEQ ID NO: 54254 - RNA, 19 nt, Artificial Sequence
  Antisense Oligo
aagacuugguaacaaaacg

SEQ ID NO: 54255 - RNA, 19 nt, Artificial Sequence
  Sense Oligo
guuuuguuaccaagucuuc

SEQ ID NO: 54256 - RNA, 19 nt, Artificial Sequence
  Antisense Oligo
gaagacuugguaacaaaac

SEQ ID NO: 54257 - RNA, 19 nt, Artificial Sequence
  Sense Oligo
uuuuguuaccaagucuucu

SEQ ID NO: 54258 - RNA, 19 nt, Artificial Sequence
  Antisense Oligo
agaagacuugguaacaaaa

SEQ ID NO: 54259 - RNA, 19 nt, Artificial Sequence
  Sense Oligo
gucuucuugucgugacuag

SEQ ID NO: 54260 - RNA, 19 nt, Artificial Sequence
  Antisense Oligo
cuagucacgacaagaagac

SEQ ID NO: 54261 - RNA, 19 nt, Artificial Sequence
  Sense Oligo
ucuucuugucgugacuagu

SEQ ID NO: 54262 - RNA, 19 nt, Artificial Sequence
  Antisense Oligo
acuagucacgacaagaaga

SEQ ID NO: 54263 - RNA, 19 nt, Artificial Sequence
  Sense Oligo
cuucuugucgugacuagua

SEQ ID NO: 54264 - RNA, 19 nt, Artificial Sequence
  Antisense Oligo
uacuagucacgacaagaag

SEQ ID NO: 54265 - RNA, 19 nt, Artificial Sequence
  Sense Oligo
uucuugucgugacuaguag

SEQ ID NO: 54266 - RNA, 19 nt, Artificial Sequence
  Antisense Oligo
cuacuagucacgacaagaa

SEQ ID NO: 54267 - RNA, 19 nt, Artificial Sequence
  Sense Oligo
ucuugucgugacuaguagc

SEQ ID NO: 54268 - RNA, 19 nt, Artificial Sequence
  Antisense Oligo
gcuacuagucacgacaaga

SEQ ID NO: 54269 - RNA, 19 nt, Artificial Sequence
  Sense Oligo
cuugucgugacuaguagcu

SEQ ID NO: 54270 - RNA, 19 nt, Artificial Sequence
  Antisense Oligo
agcuacuagucacgacaag

SEQ ID NO: 54271 - RNA, 19 nt, Artificial Sequence
  Sense Oligo
uugucgugacuaguagcua

SEQ ID NO: 54272 - RNA, 19 nt, Artificial Sequence
  Antisense Oligo
uagcuacuagucacgacaa

SEQ ID NO: 54273 - RNA, 19 nt, Artificial Sequence
  Sense Oligo
cacagccugguuacuugua

SEQ ID NO: 54274 - RNA, 19 nt, Artificial Sequence
  Antisense Oligo
uacaaguaaccaggcugug

SEQ ID NO: 54275 - RNA, 19 nt, Artificial Sequence
  Sense Oligo
acagccugguuacuuguac

SEQ ID NO: 54276 - RNA, 19 nt, Artificial Sequence
  Antisense Oligo
guacaaguaaccaggcugu

SEQ ID NO: 54277 - RNA, 19 nt, Artificial Sequence
  Sense Oligo
cagccugguuacuuguacu

SEQ ID NO: 54278 - RNA, 19 nt, Artificial Sequence
  Antisense Oligo
aguacaaguaaccaggcug

SEQ ID NO: 54279 - RNA, 19 nt, Artificial Sequence
  Sense Oligo
agccugguuacuuguacug

SEQ ID NO: 54280 - RNA, 19 nt, Artificial Sequence
  Antisense Oligo
caguacaaguaaccaggcu

SEQ ID NO: 54281 - RNA, 19 nt, Artificial Sequence
  Sense Oligo
gccugguuacuuguacugg

SEQ ID NO: 54282 - RNA, 19 nt, Artificial Sequence
  Antisense Oligo
ccaguacaaguaaccaggc

SEQ ID NO: 54283 - RNA, 19 nt, Artificial Sequence
  Sense Oligo
ccugguuacuuguacuggu

SEQ ID NO: 54284 - RNA, 19 nt, Artificial Sequence
  Antisense Oligo
accaguacaaguaaccagg

SEQ ID NO: 54285 - RNA, 19 nt, Artificial Sequence
  Sense Oligo
cugguuacuuguacugguu

SEQ ID NO: 54286 - RNA, 19 nt, Artificial Sequence
  Antisense Oligo
aaccaguacaaguaaccag

SEQ ID NO: 54287 - RNA, 19 nt, Artificial Sequence
  Sense Oligo
ugguuacuuguacugguug

SEQ ID NO: 54288 - RNA, 19 nt, Artificial Sequence
  Antisense Oligo
caaccaguacaaguaacca

SEQ ID NO: 54289 - RNA, 19 nt, Artificial Sequence
  Sense Oligo
gguuacuuguacugguugu

SEQ ID NO: 54290 - RNA, 19 nt, Artificial Sequence
  Antisense Oligo
acaaccaguacaaguaacc

SEQ ID NO: 54291 - RNA, 19 nt, Artificial Sequence
  Sense Oligo
cugacauuuucacauauag

SEQ ID NO: 54292 - RNA, 19 nt, Artificial Sequence
  Antisense Oligo
cuauaugugaaaaugucag

SEQ ID NO: 54293 - RNA, 19 nt, Artificial Sequence
  Sense Oligo
ugacauuuucacauauagg

SEQ ID NO: 54294 - RNA, 19 nt, Artificial Sequence
  Antisense Oligo
ccuauaugugaaaauguca

SEQ ID NO: 54295 - RNA, 19 nt, Artificial Sequence
  Sense Oligo
acauuuucacauauaggca

SEQ ID NO: 54296 - RNA, 19 nt, Artificial Sequence
  Antisense Oligo
ugccuauaugugaaaaugu

SEQ ID NO: 54297 - RNA, 19 nt, Artificial Sequence
  Sense Oligo
cauuuucacauauaggcac

SEQ ID NO: 54298 - RNA, 19 nt, Artificial Sequence
  Antisense Oligo
gugccuauaugugaaaaug

SEQ ID NO: 54299 - RNA, 19 nt, Artificial Sequence
  Sense Oligo
auuuucacauauaggcaca

SEQ ID NO: 54300 - RNA, 19 nt, Artificial Sequence
  Antisense Oligo
ugugccuauaugugaaaau

SEQ ID NO: 54301 - RNA, 19 nt, Artificial Sequence
  Sense Oligo
ucacauauaggcacaugag

SEQ ID NO: 54302 - RNA, 19 nt, Artificial Sequence
  Antisense Oligo
cucaugugccuauauguga

SEQ ID NO: 54303 - RNA, 19 nt, Artificial Sequence
  Sense Oligo
cacauauaggcacaugagu

SEQ ID NO: 54304 - RNA, 19 nt, Artificial Sequence
  Antisense Oligo
acucaugugccuauaugug

SEQ ID NO: 54305 - RNA, 19 nt, Artificial Sequence
  Sense Oligo
acauauaggcacaugaguu

SEQ ID NO: 54306 - RNA, 19 nt, Artificial Sequence
  Antisense Oligo
aacucaugugccuauaugu

SEQ ID NO: 54307 - RNA, 19 nt, Artificial Sequence
  Sense Oligo
cauauaggcacaugaguuu

SEQ ID NO: 54308 - RNA, 19 nt, Artificial Sequence
  Antisense Oligo
aaacucaugugccuauaug

SEQ ID NO: 54309 - RNA, 19 nt, Artificial Sequence
  Sense Oligo
auauaggcacaugaguuua

SEQ ID NO: 54310 - RNA, 19 nt, Artificial Sequence
  Antisense Oligo
uaaacucaugugccuauau

SEQ ID NO: 54311 - RNA, 19 nt, Artificial Sequence
  Sense Oligo
uauaggcacaugaguuuag

SEQ ID NO: 54312 - RNA, 19 nt, Artificial Sequence
  Antisense Oligo
cuaaacucaugugccuaua

SEQ ID NO: 54313 - RNA, 19 nt, Artificial Sequence
  Sense Oligo
auaggcacaugaguuuagu

SEQ ID NO: 54314 - RNA, 19 nt, Artificial Sequence
  Antisense Oligo
acuaaacucaugugccuau

SEQ ID NO: 54315 - RNA, 19 nt, Artificial Sequence
  Sense Oligo
uaggcacaugaguuuagua

SEQ ID NO: 54316 - RNA, 19 nt, Artificial Sequence
  Antisense Oligo
uacuaaacucaugugccua

SEQ ID NO: 54317 - RNA, 19 nt, Artificial Sequence
  Sense Oligo
aggcacaugaguuuaguau

SEQ ID NO: 54318 - RNA, 19 nt, Artificial Sequence
  Antisense Oligo
auacuaaacucaugugccu

SEQ ID NO: 54319 - RNA, 19 nt, Artificial Sequence
  Sense Oligo
acaugaguuuaguauuccc

SEQ ID NO: 54320 - RNA, 19 nt, Artificial Sequence
  Antisense Oligo
gggaauacuaaacucaugu

SEQ ID NO: 54321 - RNA, 19 nt, Artificial Sequence
  Sense Oligo
caugaguuuaguauuccca

SEQ ID NO: 54322 - RNA, 19 nt, Artificial Sequence
  Antisense Oligo
ugggaauacuaaacucaug

SEQ ID NO: 54323 - RNA, 19 nt, Artificial Sequence
  Sense Oligo
augaguuuaguauucccac

SEQ ID NO: 54324 - RNA, 19 nt, Artificial Sequence
  Antisense Oligo
gugggaauacuaaacucau

SEQ ID NO: 54325 - RNA, 19 nt, Artificial Sequence
  Sense Oligo
caagcacacgcaucuagca

SEQ ID NO: 54326 - RNA, 19 nt, Artificial Sequence
  Antisense Oligo
ugcuagaugcgugugcuug

SEQ ID NO: 54327 - RNA, 19 nt, Artificial Sequence
  Sense Oligo
aagcacacgcaucuagcaa

SEQ ID NO: 54328 - RNA, 19 nt, Artificial Sequence
  Antisense Oligo
uugcuagaugcgugugcuu

SEQ ID NO: 54329 - RNA, 19 nt, Artificial Sequence
  Sense Oligo
agcacacgcaucuagcaag

SEQ ID NO: 54330 - RNA, 19 nt, Artificial Sequence
  Antisense Oligo
cuugcuagaugcgugugcu

SEQ ID NO: 54331 - RNA, 19 nt, Artificial Sequence
  Sense Oligo
gcacacgcaucuagcaaga

SEQ ID NO: 54332 - RNA, 19 nt, Artificial Sequence
  Antisense Oligo
ucuugcuagaugcgugugc

SEQ ID NO: 54333 - RNA, 19 nt, Artificial Sequence
  Sense Oligo
cacacgcaucuagcaagaa

SEQ ID NO: 54334 - RNA, 19 nt, Artificial Sequence
  Antisense Oligo
uucuugcuagaugcgugug

SEQ ID NO: 54335 - RNA, 19 nt, Artificial Sequence
  Sense Oligo
acacgcaucuagcaagaag

SEQ ID NO: 54336 - RNA, 19 nt, Artificial Sequence
  Antisense Oligo
cuucuugcuagaugcgugu

SEQ ID NO: 54337 - RNA, 19 nt, Artificial Sequence
  Sense Oligo
gcaucuagcaagaagccaa

SEQ ID NO: 54338 - RNA, 19 nt, Artificial Sequence
  Antisense Oligo
uuggcuucuugcuagaugc

SEQ ID NO: 54339 - RNA, 19 nt, Artificial Sequence
  Sense Oligo
caucuagcaagaagccaac

SEQ ID NO: 54340 - RNA, 19 nt, Artificial Sequence
  Antisense Oligo
guuggcuucuugcuagaug

SEQ ID NO: 54341 - RNA, 19 nt, Artificial Sequence
  Sense Oligo
agugccgugaagggaccac

SEQ ID NO: 54342 - RNA, 19 nt, Artificial Sequence
  Antisense Oligo
guggucccuucacggcacu

SEQ ID NO: 54343 - RNA, 19 nt, Artificial Sequence
  Sense Oligo
gugccgugaagggaccaca

SEQ ID NO: 54344 - RNA, 19 nt, Artificial Sequence
  Antisense Oligo
uguggucccuucacggcac

SEQ ID NO: 54345 - RNA, 19 nt, Artificial Sequence
  Sense Oligo
cgugaagggaccacagugg

SEQ ID NO: 54346 - RNA, 19 nt, Artificial Sequence
  Antisense Oligo
ccacuguggucccuucacg

SEQ ID NO: 54347 - RNA, 19 nt, Artificial Sequence
  Sense Oligo
aacucaagaggccagaauc

SEQ ID NO: 54348 - RNA, 19 nt, Artificial Sequence
  Antisense Oligo
gauucuggccucuugaguu

SEQ ID NO: 54349 - RNA, 19 nt, Artificial Sequence
  Sense Oligo
acucaagaggccagaaucu

SEQ ID NO: 54350 - RNA, 19 nt, Artificial Sequence
  Antisense Oligo
agauucuggccucuugagu

SEQ ID NO: 54351 - RNA, 19 nt, Artificial Sequence
  Sense Oligo
cucaagaggccagaaucug

SEQ ID NO: 54352 - RNA, 19 nt, Artificial Sequence
  Antisense Oligo
cagauucuggccucuugag

SEQ ID NO: 54353 - RNA, 19 nt, Artificial Sequence
  Sense Oligo
ucaagaggccagaaucugu

SEQ ID NO: 54354 - RNA, 19 nt, Artificial Sequence
  Antisense Oligo
acagauucuggccucuuga

SEQ ID NO: 54355 - RNA, 19 nt, Artificial Sequence
  Sense Oligo
caagaggccagaaucugug

SEQ ID NO: 54356 - RNA, 19 nt, Artificial Sequence
  Antisense Oligo
cacagauucuggccucuug

SEQ ID NO: 54357 - RNA, 19 nt, Artificial Sequence
  Sense Oligo
aagaggccagaaucugugg

SEQ ID NO: 54358 - RNA, 19 nt, Artificial Sequence
  Antisense Oligo
ccacagauucuggccucuu

SEQ ID NO: 54359 - RNA, 19 nt, Artificial Sequence
  Sense Oligo
agaaucuguggugcugagc

SEQ ID NO: 54360 - RNA, 19 nt, Artificial Sequence
  Antisense Oligo
gcucagcaccacagauucu

SEQ ID NO: 54361 - RNA, 19 nt, Artificial Sequence
  Sense Oligo
uguggugcugagccugguu

SEQ ID NO: 54362 - RNA, 19 nt, Artificial Sequence
  Antisense Oligo
aaccaggcucagcaccaca

SEQ ID NO: 54363 - RNA, 19 nt, Artificial Sequence
  Sense Oligo
guggugcugagccugguuc

SEQ ID NO: 54364 - RNA, 19 nt, Artificial Sequence
  Antisense Oligo
gaaccaggcucagcaccac

SEQ ID NO: 54365 - RNA, 19 nt, Artificial Sequence
  Sense Oligo
uggugcugagccugguucc

SEQ ID NO: 54366 - RNA, 19 nt, Artificial Sequence
  Antisense Oligo
ggaaccaggcucagcacca

SEQ ID NO: 54367 - RNA, 19 nt, Artificial Sequence
  Sense Oligo
ggugcugagccugguucca

SEQ ID NO: 54368 - RNA, 19 nt, Artificial Sequence
  Antisense Oligo
uggaaccaggcucagcacc

SEQ ID NO: 54369 - RNA, 19 nt, Artificial Sequence
  Sense Oligo
gugcugagccugguuccac

SEQ ID NO: 54370 - RNA, 19 nt, Artificial Sequence
  Antisense Oligo
guggaaccaggcucagcac

SEQ ID NO: 54371 - RNA, 19 nt, Artificial Sequence
  Sense Oligo
cugguuccacagcagcgca

SEQ ID NO: 54372 - RNA, 19 nt, Artificial Sequence
  Antisense Oligo
ugcgcugcuguggaaccag

SEQ ID NO: 54373 - RNA, 19 nt, Artificial Sequence
  Sense Oligo
ugguuccacagcagcgcaa

SEQ ID NO: 54374 - RNA, 19 nt, Artificial Sequence
  Antisense Oligo
uugcgcugcuguggaacca

SEQ ID NO: 54375 - RNA, 19 nt, Artificial Sequence
  Sense Oligo
gguuccacagcagcgcaac

SEQ ID NO: 54376 - RNA, 19 nt, Artificial Sequence
  Antisense Oligo
guugcgcugcuguggaacc

SEQ ID NO: 54377 - RNA, 19 nt, Artificial Sequence
  Sense Oligo
guuccacagcagcgcaacu

SEQ ID NO: 54378 - RNA, 19 nt, Artificial Sequence
  Antisense Oligo
aguugcgcugcuguggaac

SEQ ID NO: 54379 - RNA, 19 nt, Artificial Sequence
  Sense Oligo
cacagcagcgcaacuuucu

SEQ ID NO: 54380 - RNA, 19 nt, Artificial Sequence
  Antisense Oligo
agaaaguugcgcugcugug

SEQ ID NO: 54381 - RNA, 19 nt, Artificial Sequence
  Sense Oligo
acagcagcgcaacuuucug

SEQ ID NO: 54382 - RNA, 19 nt, Artificial Sequence
  Antisense Oligo
cagaaaguugcgcugcugu

SEQ ID NO: 54383 - RNA, 19 nt, Artificial Sequence
  Sense Oligo
cagcagcgcaacuuucuga

SEQ ID NO: 54384 - RNA, 19 nt, Artificial Sequence
  Antisense Oligo
ucagaaaguugcgcugcug

SEQ ID NO: 54385 - RNA, 19 nt, Artificial Sequence
  Sense Oligo
agcagcgcaacuuucugau

SEQ ID NO: 54386 - RNA, 19 nt, Artificial Sequence
  Antisense Oligo
aucagaaaguugcgcugcu

SEQ ID NO: 54387 - RNA, 19 nt, Artificial Sequence
  Sense Oligo
gcagcgcaacuuucugauu

SEQ ID NO: 54388 - RNA, 19 nt, Artificial Sequence
  Antisense Oligo
aaucagaaaguugcgcugc

SEQ ID NO: 54389 - RNA, 19 nt, Artificial Sequence
  Sense Oligo
uuuucagaugguagcuuag

SEQ ID NO: 54390 - RNA, 19 nt, Artificial Sequence
  Antisense Oligo
cuaagcuaccaucugaaaa

SEQ ID NO: 54391 - RNA, 19 nt, Artificial Sequence
  Sense Oligo
uuucagaugguagcuuaga

SEQ ID NO: 54392 - RNA, 19 nt, Artificial Sequence
  Antisense Oligo
ucuaagcuaccaucugaaa

SEQ ID NO: 54393 - RNA, 19 nt, Artificial Sequence
  Sense Oligo
uucagaugguagcuuagaa

SEQ ID NO: 54394 - RNA, 19 nt, Artificial Sequence
  Antisense Oligo
uucuaagcuaccaucugaa

SEQ ID NO: 54395 - RNA, 19 nt, Artificial Sequence
  Sense Oligo
ucagaugguagcuuagaau

SEQ ID NO: 54396 - RNA, 19 nt, Artificial Sequence
  Antisense Oligo
auucuaagcuaccaucuga

SEQ ID NO: 54397 - RNA, 19 nt, Artificial Sequence
  Sense Oligo
cagaugguagcuuagaauc

SEQ ID NO: 54398 - RNA, 19 nt, Artificial Sequence
  Antisense Oligo
gauucuaagcuaccaucug

SEQ ID NO: 54399 - RNA, 19 nt, Artificial Sequence
  Sense Oligo
agaugguagcuuagaaucc

SEQ ID NO: 54400 - RNA, 19 nt, Artificial Sequence
  Antisense Oligo
ggauucuaagcuaccaucu

SEQ ID NO: 54401 - RNA, 19 nt, Artificial Sequence
  Sense Oligo
gaugguagcuuagaauccu

SEQ ID NO: 54402 - RNA, 19 nt, Artificial Sequence
  Antisense Oligo
aggauucuaagcuaccauc

SEQ ID NO: 54403 - RNA, 19 nt, Artificial Sequence
  Sense Oligo
augguagcuuagaauccug

SEQ ID NO: 54404 - RNA, 19 nt, Artificial Sequence
  Antisense Oligo
caggauucuaagcuaccau

SEQ ID NO: 54405 - RNA, 19 nt, Artificial Sequence
  Sense Oligo
ugguagcuuagaauccugc

SEQ ID NO: 54406 - RNA, 19 nt, Artificial Sequence
  Antisense Oligo
gcaggauucuaagcuacca

SEQ ID NO: 54407 - RNA, 19 nt, Artificial Sequence
  Sense Oligo
gguagcuuagaauccugcu

SEQ ID NO: 54408 - RNA, 19 nt, Artificial Sequence
  Antisense Oligo
agcaggauucuaagcuacc

SEQ ID NO: 54409 - RNA, 19 nt, Artificial Sequence
  Sense Oligo
guagcuuagaauccugcuc

SEQ ID NO: 54410 - RNA, 19 nt, Artificial Sequence
  Antisense Oligo
gagcaggauucuaagcuac

SEQ ID NO: 54411 - RNA, 19 nt, Artificial Sequence
  Sense Oligo
uagcuuagaauccugcuca

SEQ ID NO: 54412 - RNA, 19 nt, Artificial Sequence
  Antisense Oligo
ugagcaggauucuaagcua

SEQ ID NO: 54413 - RNA, 19 nt, Artificial Sequence
  Sense Oligo
agcuuagaauccugcucac

SEQ ID NO: 54414 - RNA, 19 nt, Artificial Sequence
  Antisense Oligo
gugagcaggauucuaagcu

SEQ ID NO: 54415 - RNA, 19 nt, Artificial Sequence
  Sense Oligo
gcuuagaauccugcucacc

SEQ ID NO: 54416 - RNA, 19 nt, Artificial Sequence
  Antisense Oligo
ggugagcaggauucuaagc

SEQ ID NO: 54417 - RNA, 19 nt, Artificial Sequence
  Sense Oligo
cuuagaauccugcucaccc

SEQ ID NO: 54418 - RNA, 19 nt, Artificial Sequence
  Antisense Oligo
gggugagcaggauucuaag

SEQ ID NO: 54419 - RNA, 19 nt, Artificial Sequence
  Sense Oligo
uuagaauccugcucacccu

SEQ ID NO: 54420 - RNA, 19 nt, Artificial Sequence
  Antisense Oligo
agggugagcaggauucuaa

SEQ ID NO: 54421 - RNA, 19 nt, Artificial Sequence
  Sense Oligo
uagaauccugcucacccug

SEQ ID NO: 54422 - RNA, 19 nt, Artificial Sequence
  Antisense Oligo
cagggugagcaggauucua

SEQ ID NO: 54423 - RNA, 19 nt, Artificial Sequence
  Sense Oligo
agaauccugcucacccuga

SEQ ID NO: 54424 - RNA, 19 nt, Artificial Sequence
  Antisense Oligo
ucagggugagcaggauucu

SEQ ID NO: 54425 - RNA, 19 nt, Artificial Sequence
  Sense Oligo
gaauccugcucacccugaa

SEQ ID NO: 54426 - RNA, 19 nt, Artificial Sequence
  Antisense Oligo
uucagggugagcaggauuc

SEQ ID NO: 54427 - RNA, 19 nt, Artificial Sequence
  Sense Oligo
ugcucacccugaauguccu

SEQ ID NO: 54428 - RNA, 19 nt, Artificial Sequence
  Antisense Oligo
aggacauucagggugagca

SEQ ID NO: 54429 - RNA, 19 nt, Artificial Sequence
  Sense Oligo
gcucacccugaauguccua

SEQ ID NO: 54430 - RNA, 19 nt, Artificial Sequence
  Antisense Oligo
uaggacauucagggugagc

SEQ ID NO: 54431 - RNA, 19 nt, Artificial Sequence
  Sense Oligo
cucacccugaauguccuag

SEQ ID NO: 54432 - RNA, 19 nt, Artificial Sequence
  Antisense Oligo
cuaggacauucagggugag

SEQ ID NO: 54433 - RNA, 19 nt, Artificial Sequence
  Sense Oligo
ucacccugaauguccuaga

SEQ ID NO: 54434 - RNA, 19 nt, Artificial Sequence
  Antisense Oligo
ucuaggacauucaggguga

SEQ ID NO: 54435 - RNA, 19 nt, Artificial Sequence
  Sense Oligo
cacccugaauguccuagau

SEQ ID NO: 54436 - RNA, 19 nt, Artificial Sequence
  Antisense Oligo
aucuaggacauucagggug

SEQ ID NO: 54437 - RNA, 19 nt, Artificial Sequence
  Sense Oligo
acccugaauguccuagaug

SEQ ID NO: 54438 - RNA, 19 nt, Artificial Sequence
  Antisense Oligo
caucuaggacauucagggu

SEQ ID NO: 54439 - RNA, 19 nt, Artificial Sequence
  Sense Oligo
cccugaauguccuagaugu

SEQ ID NO: 54440 - RNA, 19 nt, Artificial Sequence
  Antisense Oligo
acaucuaggacauucaggg

SEQ ID NO: 54441 - RNA, 19 nt, Artificial Sequence
  Sense Oligo
ccugaauguccuagauguc

SEQ ID NO: 54442 - RNA, 19 nt, Artificial Sequence
  Antisense Oligo
gacaucuaggacauucagg

SEQ ID NO: 54443 - RNA, 19 nt, Artificial Sequence
  Sense Oligo
cugaauguccuagaugucu

SEQ ID NO: 54444 - RNA, 19 nt, Artificial Sequence
  Antisense Oligo
agacaucuaggacauucag

SEQ ID NO: 54445 - RNA, 19 nt, Artificial Sequence
  Sense Oligo
ugaauguccuagaugucuc

SEQ ID NO: 54446 - RNA, 19 nt, Artificial Sequence
  Antisense Oligo
gagacaucuaggacauuca

SEQ ID NO: 54447 - RNA, 19 nt, Artificial Sequence
  Sense Oligo
uguccuagaugucuccuaa

SEQ ID NO: 54448 - RNA, 19 nt, Artificial Sequence
  Antisense Oligo
uuaggagacaucuaggaca

SEQ ID NO: 54449 - RNA, 19 nt, Artificial Sequence
  Sense Oligo
guccuagaugucuccuaag

SEQ ID NO: 54450 - RNA, 19 nt, Artificial Sequence
  Antisense Oligo
cuuaggagacaucuaggac

SEQ ID NO: 54451 - RNA, 19 nt, Artificial Sequence
  Sense Oligo
uccuagaugucuccuaagu

SEQ ID NO: 54452 - RNA, 19 nt, Artificial Sequence
  Antisense Oligo
acuuaggagacaucuagga

SEQ ID NO: 54453 - RNA, 19 nt, Artificial Sequence
  Sense Oligo
ccuagaugucuccuaaguu

SEQ ID NO: 54454 - RNA, 19 nt, Artificial Sequence
  Antisense Oligo
aacuuaggagacaucuagg

SEQ ID NO: 54455 - RNA, 19 nt, Artificial Sequence
  Sense Oligo
cuagaugucuccuaaguuu

SEQ ID NO: 54456 - RNA, 19 nt, Artificial Sequence
  Antisense Oligo
aaacuuaggagacaucuag

SEQ ID NO: 54457 - RNA, 19 nt, Artificial Sequence
  Sense Oligo
uagaugucuccuaaguuuc

SEQ ID NO: 54458 - RNA, 19 nt, Artificial Sequence
  Antisense Oligo
gaaacuuaggagacaucua

SEQ ID NO: 54459 - RNA, 19 nt, Artificial Sequence
  Sense Oligo
agaugucuccuaaguuucu

SEQ ID NO: 54460 - RNA, 19 nt, Artificial Sequence
  Antisense Oligo
agaaacuuaggagacaucu

SEQ ID NO: 54461 - RNA, 19 nt, Artificial Sequence
  Sense Oligo
gaugucuccuaaguuucua

SEQ ID NO: 54462 - RNA, 19 nt, Artificial Sequence
  Antisense Oligo
uagaaacuuaggagacauc

SEQ ID NO: 54463 - RNA, 19 nt, Artificial Sequence
  Sense Oligo
augucuccuaaguuucuau

SEQ ID NO: 54464 - RNA, 19 nt, Artificial Sequence
  Antisense Oligo
auagaaacuuaggagacau

SEQ ID NO: 54465 - RNA, 19 nt, Artificial Sequence
  Sense Oligo
ugucuccuaaguuucuauu

SEQ ID NO: 54466 - RNA, 19 nt, Artificial Sequence
  Antisense Oligo
aauagaaacuuaggagaca

SEQ ID NO: 54467 - RNA, 19 nt, Artificial Sequence
  Sense Oligo
gucuccuaaguuucuauuc

SEQ ID NO: 54468 - RNA, 19 nt, Artificial Sequence
  Antisense Oligo
gaauagaaacuuaggagac

SEQ ID NO: 54469 - RNA, 19 nt, Artificial Sequence
  Sense Oligo
ucuccuaaguuucuauucc

SEQ ID NO: 54470 - RNA, 19 nt, Artificial Sequence
  Antisense Oligo
ggaauagaaacuuaggaga

SEQ ID NO: 54471 - RNA, 19 nt, Artificial Sequence
  Sense Oligo
cuccuaaguuucuauuccc

SEQ ID NO: 54472 - RNA, 19 nt, Artificial Sequence
  Antisense Oligo
gggaauagaaacuuaggag

SEQ ID NO: 54473 - RNA, 19 nt, Artificial Sequence
  Sense Oligo
augggcucuauuuccuugg

SEQ ID NO: 54474 - RNA, 19 nt, Artificial Sequence
  Antisense Oligo
ccaaggaaauagagcccau

SEQ ID NO: 54475 - RNA, 19 nt, Artificial Sequence
  Sense Oligo
ugggcucuauuuccuugga

SEQ ID NO: 54476 - RNA, 19 nt, Artificial Sequence
  Antisense Oligo
uccaaggaaauagagccca

SEQ ID NO: 54477 - RNA, 19 nt, Artificial Sequence
  Sense Oligo
gggcucuauuuccuuggaa

SEQ ID NO: 54478 - RNA, 19 nt, Artificial Sequence
  Antisense Oligo
uuccaaggaaauagagccc

SEQ ID NO: 54479 - RNA, 19 nt, Artificial Sequence
  Sense Oligo
auguugacauccaagaaua

SEQ ID NO: 54480 - RNA, 19 nt, Artificial Sequence
  Antisense Oligo
uauucuuggaugucaacau

SEQ ID NO: 54481 - RNA, 19 nt, Artificial Sequence
  Sense Oligo
gacauccaagaauaguauc

SEQ ID NO: 54482 - RNA, 19 nt, Artificial Sequence
  Antisense Oligo
gauacuauucuuggauguc

SEQ ID NO: 54483 - RNA, 19 nt, Artificial Sequence
  Sense Oligo
acauccaagaauaguauca

SEQ ID NO: 54484 - RNA, 19 nt, Artificial Sequence
  Antisense Oligo
ugauacuauucuuggaugu

SEQ ID NO: 54485 - RNA, 19 nt, Artificial Sequence
  Sense Oligo
cauccaagaauaguaucac

SEQ ID NO: 54486 - RNA, 19 nt, Artificial Sequence
  Antisense Oligo
gugauacuauucuuggaug

SEQ ID NO: 54487 - RNA, 19 nt, Artificial Sequence
  Sense Oligo
auccaagaauaguaucacc

SEQ ID NO: 54488 - RNA, 19 nt, Artificial Sequence
  Antisense Oligo
ggugauacuauucuuggau

SEQ ID NO: 54489 - RNA, 19 nt, Artificial Sequence
  Sense Oligo
uccaagaauaguaucaccu

SEQ ID NO: 54490 - RNA, 19 nt, Artificial Sequence
  Antisense Oligo
aggugauacuauucuugga

SEQ ID NO: 54491 - RNA, 19 nt, Artificial Sequence
  Sense Oligo
agaauaguaucaccugugg

SEQ ID NO: 54492 - RNA, 19 nt, Artificial Sequence
  Antisense Oligo
ccacaggugauacuauucu

SEQ ID NO: 54493 - RNA, 19 nt, Artificial Sequence
  Sense Oligo
guaucaccugugguacuug

SEQ ID NO: 54494 - RNA, 19 nt, Artificial Sequence
  Antisense Oligo
caaguaccacaggugauac

SEQ ID NO: 54495 - RNA, 19 nt, Artificial Sequence
  Sense Oligo
uaucaccugugguacuugu

SEQ ID NO: 54496 - RNA, 19 nt, Artificial Sequence
  Antisense Oligo
acaaguaccacaggugaua

SEQ ID NO: 54497 - RNA, 19 nt, Artificial Sequence
  Sense Oligo
aucaccugugguacuugua

SEQ ID NO: 54498 - RNA, 19 nt, Artificial Sequence
  Antisense Oligo
uacaaguaccacaggugau

SEQ ID NO: 54499 - RNA, 19 nt, Artificial Sequence
  Sense Oligo
ccugugguacuuguaugga

SEQ ID NO: 54500 - RNA, 19 nt, Artificial Sequence
  Antisense Oligo
uccauacaaguaccacagg

SEQ ID NO: 54501 - RNA, 19 nt, Artificial Sequence
  Sense Oligo
cugugguacuuguauggau

SEQ ID NO: 54502 - RNA, 19 nt, Artificial Sequence
  Antisense Oligo
auccauacaaguaccacag

SEQ ID NO: 54503 - RNA, 19 nt, Artificial Sequence
  Sense Oligo
ugugguacuuguauggauc

SEQ ID NO: 54504 - RNA, 19 nt, Artificial Sequence
  Antisense Oligo
gauccauacaaguaccaca

SEQ ID NO: 54505 - RNA, 19 nt, Artificial Sequence
  Sense Oligo
gugguacuuguauggaucu

SEQ ID NO: 54506 - RNA, 19 nt, Artificial Sequence
  Antisense Oligo
agauccauacaaguaccac

SEQ ID NO: 54507 - RNA, 19 nt, Artificial Sequence
  Sense Oligo
ugguacuuguauggaucua

SEQ ID NO: 54508 - RNA, 19 nt, Artificial Sequence
  Antisense Oligo
uagauccauacaaguacca

SEQ ID NO: 54509 - RNA, 19 nt, Artificial Sequence
  Sense Oligo
gguacuuguauggaucuaa

SEQ ID NO: 54510 - RNA, 19 nt, Artificial Sequence
  Antisense Oligo
uuagauccauacaaguacc

SEQ ID NO: 54511 - RNA, 19 nt, Artificial Sequence
  Sense Oligo
guacuuguauggaucuaau

SEQ ID NO: 54512 - RNA, 19 nt, Artificial Sequence
  Antisense Oligo
auuagauccauacaaguac

SEQ ID NO: 54513 - RNA, 19 nt, Artificial Sequence
  Sense Oligo
uauggaucuaauauugcag

SEQ ID NO: 54514 - RNA, 19 nt, Artificial Sequence
  Antisense Oligo
cugcaauauuagauccaua

SEQ ID NO: 54515 - RNA, 19 nt, Artificial Sequence
  Sense Oligo
aauauugcaguucucaaag

SEQ ID NO: 54516 - RNA, 19 nt, Artificial Sequence
  Antisense Oligo
cuuugagaacugcaauauu

SEQ ID NO: 54517 - RNA, 19 nt, Artificial Sequence
  Sense Oligo
auauugcaguucucaaagu

SEQ ID NO: 54518 - RNA, 19 nt, Artificial Sequence
  Antisense Oligo
acuuugagaacugcaauau

SEQ ID NO: 54519 - RNA, 19 nt, Artificial Sequence
  Sense Oligo
uauugcaguucucaaagug

SEQ ID NO: 54520 - RNA, 19 nt, Artificial Sequence
  Antisense Oligo
cacuuugagaacugcaaua

SEQ ID NO: 54521 - RNA, 19 nt, Artificial Sequence
  Sense Oligo
aguucucaaaguguuggua

SEQ ID NO: 54522 - RNA, 19 nt, Artificial Sequence
  Antisense Oligo
uaccaacacuuugagaacu

SEQ ID NO: 54523 - RNA, 19 nt, Artificial Sequence
  Sense Oligo
guucucaaaguguugguau

SEQ ID NO: 54524 - RNA, 19 nt, Artificial Sequence
  Antisense Oligo
auaccaacacuuugagaac

SEQ ID NO: 54525 - RNA, 19 nt, Artificial Sequence
  Sense Oligo
caaaguguugguauggacc

SEQ ID NO: 54526 - RNA, 19 nt, Artificial Sequence
  Antisense Oligo
gguccauaccaacacuuug

SEQ ID NO: 54527 - RNA, 19 nt, Artificial Sequence
  Sense Oligo
aaaguguugguauggaccc

SEQ ID NO: 54528 - RNA, 19 nt, Artificial Sequence
  Antisense Oligo
ggguccauaccaacacuuu

SEQ ID NO: 54529 - RNA, 19 nt, Artificial Sequence
  Sense Oligo
aaguguugguauggacccu

SEQ ID NO: 54530 - RNA, 19 nt, Artificial Sequence
  Antisense Oligo
aggguccauaccaacacuu

SEQ ID NO: 54531 - RNA, 19 nt, Artificial Sequence
  Sense Oligo
aguguugguauggacccuu

SEQ ID NO: 54532 - RNA, 19 nt, Artificial Sequence
  Antisense Oligo
aaggguccauaccaacacu

SEQ ID NO: 54533 - RNA, 19 nt, Artificial Sequence
  Sense Oligo
guguugguauggacccuug

SEQ ID NO: 54534 - RNA, 19 nt, Artificial Sequence
  Antisense Oligo
caaggguccauaccaacac

SEQ ID NO: 54535 - RNA, 19 nt, Artificial Sequence
  Sense Oligo
uguugguauggacccuugg

SEQ ID NO: 54536 - RNA, 19 nt, Artificial Sequence
  Antisense Oligo
ccaaggguccauaccaaca

SEQ ID NO: 54537 - RNA, 19 nt, Artificial Sequence
  Sense Oligo
guugguauggacccuuggg

SEQ ID NO: 54538 - RNA, 19 nt, Artificial Sequence
  Antisense Oligo
cccaaggguccauaccaac

SEQ ID NO: 54539 - RNA, 19 nt, Artificial Sequence
  Sense Oligo
uugguauggacccuugggu

SEQ ID NO: 54540 - RNA, 19 nt, Artificial Sequence
  Antisense Oligo
acccaaggguccauaccaa

SEQ ID NO: 54541 - RNA, 19 nt, Artificial Sequence
  Sense Oligo
ugguauggacccuugggug

SEQ ID NO: 54542 - RNA, 19 nt, Artificial Sequence
  Antisense Oligo
cacccaaggguccauacca

SEQ ID NO: 54543 - RNA, 19 nt, Artificial Sequence
  Sense Oligo
gguauggacccuugggugu

SEQ ID NO: 54544 - RNA, 19 nt, Artificial Sequence
  Antisense Oligo
acacccaaggguccauacc

SEQ ID NO: 54545 - RNA, 19 nt, Artificial Sequence
  Sense Oligo
guauggacccuugggugug

SEQ ID NO: 54546 - RNA, 19 nt, Artificial Sequence
  Antisense Oligo
cacacccaaggguccauac

SEQ ID NO: 54547 - RNA, 19 nt, Artificial Sequence
  Sense Oligo
uauggacccuuggguguga

SEQ ID NO: 54548 - RNA, 19 nt, Artificial Sequence
  Antisense Oligo
ucacacccaaggguccaua

SEQ ID NO: 54549 - RNA, 19 nt, Artificial Sequence
  Sense Oligo
gacccuugggugugaggua

SEQ ID NO: 54550 - RNA, 19 nt, Artificial Sequence
  Antisense Oligo
uaccucacacccaaggguc

SEQ ID NO: 54551 - RNA, 19 nt, Artificial Sequence
  Sense Oligo
acccuugggugugagguag

SEQ ID NO: 54552 - RNA, 19 nt, Artificial Sequence
  Antisense Oligo
cuaccucacacccaagggu

SEQ ID NO: 54553 - RNA, 19 nt, Artificial Sequence
  Sense Oligo
cccuugggugugagguagg

SEQ ID NO: 54554 - RNA, 19 nt, Artificial Sequence
  Antisense Oligo
ccuaccucacacccaaggg

SEQ ID NO: 54555 - RNA, 19 nt, Artificial Sequence
  Sense Oligo
ccuugggugugagguaggu

SEQ ID NO: 54556 - RNA, 19 nt, Artificial Sequence
  Antisense Oligo
accuaccucacacccaagg

SEQ ID NO: 54557 - RNA, 19 nt, Artificial Sequence
  Sense Oligo
cuugggugugagguagguc

SEQ ID NO: 54558 - RNA, 19 nt, Artificial Sequence
  Antisense Oligo
gaccuaccucacacccaag

SEQ ID NO: 54559 - RNA, 19 nt, Artificial Sequence
  Sense Oligo
uugggugugagguaggucu

SEQ ID NO: 54560 - RNA, 19 nt, Artificial Sequence
  Antisense Oligo
agaccuaccucacacccaa

SEQ ID NO: 54561 - RNA, 19 nt, Artificial Sequence
  Sense Oligo
ugggugugagguaggucuc

SEQ ID NO: 54562 - RNA, 19 nt, Artificial Sequence
  Antisense Oligo
gagaccuaccucacaccca

SEQ ID NO: 54563 - RNA, 19 nt, Artificial Sequence
  Sense Oligo
gggugugagguaggucucu

SEQ ID NO: 54564 - RNA, 19 nt, Artificial Sequence
  Antisense Oligo
agagaccuaccucacaccc

SEQ ID NO: 54565 - RNA, 19 nt, Artificial Sequence
  Sense Oligo
ggugugagguaggucucug

SEQ ID NO: 54566 - RNA, 19 nt, Artificial Sequence
  Antisense Oligo
cagagaccuaccucacacc

SEQ ID NO: 54567 - RNA, 19 nt, Artificial Sequence
  Sense Oligo
gugugagguaggucucuga

SEQ ID NO: 54568 - RNA, 19 nt, Artificial Sequence
  Antisense Oligo
ucagagaccuaccucacac

SEQ ID NO: 54569 - RNA, 19 nt, Artificial Sequence
  Sense Oligo
ugugagguaggucucugag

SEQ ID NO: 54570 - RNA, 19 nt, Artificial Sequence
  Antisense Oligo
cucagagaccuaccucaca

SEQ ID NO: 54571 - RNA, 19 nt, Artificial Sequence
  Sense Oligo
gugagguaggucucugagg

SEQ ID NO: 54572 - RNA, 19 nt, Artificial Sequence
  Antisense Oligo
ccucagagaccuaccucac

SEQ ID NO: 54573 - RNA, 19 nt, Artificial Sequence
  Sense Oligo
ugagguaggucucugaggu

SEQ ID NO: 54574 - RNA, 19 nt, Artificial Sequence
  Antisense Oligo
accucagagaccuaccuca

SEQ ID NO: 54575 - RNA, 19 nt, Artificial Sequence
  Sense Oligo
gagguaggucucugagguu

SEQ ID NO: 54576 - RNA, 19 nt, Artificial Sequence
  Antisense Oligo
aaccucagagaccuaccuc

SEQ ID NO: 54577 - RNA, 19 nt, Artificial Sequence
  Sense Oligo
agguaggucucugagguua

SEQ ID NO: 54578 - RNA, 19 nt, Artificial Sequence
  Antisense Oligo
uaaccucagagaccuaccu

SEQ ID NO: 54579 - RNA, 19 nt, Artificial Sequence
  Sense Oligo
gguaggucucugagguuaa

SEQ ID NO: 54580 - RNA, 19 nt, Artificial Sequence
  Antisense Oligo
uuaaccucagagaccuacc

SEQ ID NO: 54581 - RNA, 19 nt, Artificial Sequence
  Sense Oligo
guaggucucugagguuaaa

SEQ ID NO: 54582 - RNA, 19 nt, Artificial Sequence
  Antisense Oligo
uuuaaccucagagaccuac

SEQ ID NO: 54583 - RNA, 19 nt, Artificial Sequence
  Sense Oligo
uaggucucugagguuaaaa

SEQ ID NO: 54584 - RNA, 19 nt, Artificial Sequence
  Antisense Oligo
uuuuaaccucagagaccua

SEQ ID NO: 54585 - RNA, 19 nt, Artificial Sequence
  Sense Oligo
uacuaagauaaauuugccc

SEQ ID NO: 54586 - RNA, 19 nt, Artificial Sequence
  Antisense Oligo
gggcaaauuuaucuuagua

SEQ ID NO: 54587 - RNA, 19 nt, Artificial Sequence
  Sense Oligo
acuaagauaaauuugcccu

SEQ ID NO: 54588 - RNA, 19 nt, Artificial Sequence
  Antisense Oligo
agggcaaauuuaucuuagu

SEQ ID NO: 54589 - RNA, 19 nt, Artificial Sequence
  Sense Oligo
guugauacuuaugaugaug

SEQ ID NO: 54590 - RNA, 19 nt, Artificial Sequence
  Antisense Oligo
caucaucauaaguaucaac

SEQ ID NO: 54591 - RNA, 19 nt, Artificial Sequence
  Sense Oligo
aaaagcggugaugaguuaa

SEQ ID NO: 54592 - RNA, 19 nt, Artificial Sequence
  Antisense Oligo
uuaacucaucaccgcuuuu

SEQ ID NO: 54593 - RNA, 19 nt, Artificial Sequence
  Sense Oligo
aaagcggugaugaguuaaa

SEQ ID NO: 54594 - RNA, 19 nt, Artificial Sequence
  Antisense Oligo
uuuaacucaucaccgcuuu

SEQ ID NO: 54595 - RNA, 19 nt, Artificial Sequence
  Sense Oligo
uuuucuucaccgccaugca

SEQ ID NO: 54596 - RNA, 19 nt, Artificial Sequence
  Antisense Oligo
ugcauggcggugaagaaaa

SEQ ID NO: 54597 - RNA, 19 nt, Artificial Sequence
  Sense Oligo
uuucuucaccgccaugcac

SEQ ID NO: 54598 - RNA, 19 nt, Artificial Sequence
  Antisense Oligo
gugcauggcggugaagaaa

SEQ ID NO: 54599 - RNA, 19 nt, Artificial Sequence
  Sense Oligo
ucuucaccgccaugcacac

SEQ ID NO: 54600 - RNA, 19 nt, Artificial Sequence
  Antisense Oligo
gugugcauggcggugaaga

SEQ ID NO: 54601 - RNA, 19 nt, Artificial Sequence
  Sense Oligo
cuucaccgccaugcacacg

SEQ ID NO: 54602 - RNA, 19 nt, Artificial Sequence
  Antisense Oligo
cgugugcauggcggugaag

SEQ ID NO: 54603 - RNA, 19 nt, Artificial Sequence
  Sense Oligo
uucaccgccaugcacacgu

SEQ ID NO: 54604 - RNA, 19 nt, Artificial Sequence
  Antisense Oligo
acgugugcauggcggugaa

SEQ ID NO: 54605 - RNA, 19 nt, Artificial Sequence
  Sense Oligo
ucaccgccaugcacacgug

SEQ ID NO: 54606 - RNA, 19 nt, Artificial Sequence
  Antisense Oligo
cacgugugcauggcgguga

SEQ ID NO: 54607 - RNA, 19 nt, Artificial Sequence
  Sense Oligo
accgccaugcacacguggu

SEQ ID NO: 54608 - RNA, 19 nt, Artificial Sequence
  Antisense Oligo
accacgugugcauggcggu

SEQ ID NO: 54609 - RNA, 19 nt, Artificial Sequence
  Sense Oligo
ccgccaugcacacgugguu

SEQ ID NO: 54610 - RNA, 19 nt, Artificial Sequence
  Antisense Oligo
aaccacgugugcauggcgg

SEQ ID NO: 54611 - RNA, 19 nt, Artificial Sequence
  Sense Oligo
cgccaugcacacgugguuu

SEQ ID NO: 54612 - RNA, 19 nt, Artificial Sequence
  Antisense Oligo
aaaccacgugugcauggcg

SEQ ID NO: 54613 - RNA, 19 nt, Artificial Sequence
  Sense Oligo
gccaugcacacgugguuuu

SEQ ID NO: 54614 - RNA, 19 nt, Artificial Sequence
  Antisense Oligo
aaaaccacgugugcauggc

SEQ ID NO: 54615 - RNA, 19 nt, Artificial Sequence
  Sense Oligo
ccaugcacacgugguuuuc

SEQ ID NO: 54616 - RNA, 19 nt, Artificial Sequence
  Antisense Oligo
gaaaaccacgugugcaugg

SEQ ID NO: 54617 - RNA, 19 nt, Artificial Sequence
  Sense Oligo
caugcacacgugguuuucu

SEQ ID NO: 54618 - RNA, 19 nt, Artificial Sequence
  Antisense Oligo
agaaaaccacgugugcaug

SEQ ID NO: 54619 - RNA, 19 nt, Artificial Sequence
  Sense Oligo
augcacacgugguuuucuu

SEQ ID NO: 54620 - RNA, 19 nt, Artificial Sequence
  Antisense Oligo
aagaaaaccacgugugcau

SEQ ID NO: 54621 - RNA, 19 nt, Artificial Sequence
  Sense Oligo
ugcacacgugguuuucuuc

SEQ ID NO: 54622 - RNA, 19 nt, Artificial Sequence
  Antisense Oligo
gaagaaaaccacgugugca

SEQ ID NO: 54623 - RNA, 19 nt, Artificial Sequence
  Sense Oligo
cacgugguuuucuucaugc

SEQ ID NO: 54624 - RNA, 19 nt, Artificial Sequence
  Antisense Oligo
gcaugaagaaaaccacgug

SEQ ID NO: 54625 - RNA, 19 nt, Artificial Sequence
  Sense Oligo
acgugguuuucuucaugcc

SEQ ID NO: 54626 - RNA, 19 nt, Artificial Sequence
  Antisense Oligo
ggcaugaagaaaaccacgu

SEQ ID NO: 54627 - RNA, 19 nt, Artificial Sequence
  Sense Oligo
cgugguuuucuucaugcca

SEQ ID NO: 54628 - RNA, 19 nt, Artificial Sequence
  Antisense Oligo
uggcaugaagaaaaccacg

SEQ ID NO: 54629 - RNA, 19 nt, Artificial Sequence
  Sense Oligo
gugguuuucuucaugccag

SEQ ID NO: 54630 - RNA, 19 nt, Artificial Sequence
  Antisense Oligo
cuggcaugaagaaaaccac

SEQ ID NO: 54631 - RNA, 19 nt, Artificial Sequence
  Sense Oligo
uucuucaugccaguuucau

SEQ ID NO: 54632 - RNA, 19 nt, Artificial Sequence
  Antisense Oligo
augaaacuggcaugaagaa

SEQ ID NO: 54633 - RNA, 19 nt, Artificial Sequence
  Sense Oligo
ucuucaugccaguuucauu

SEQ ID NO: 54634 - RNA, 19 nt, Artificial Sequence
  Antisense Oligo
aaugaaacuggcaugaaga

SEQ ID NO: 54635 - RNA, 19 nt, Artificial Sequence
  Sense Oligo
cuucaugccaguuucauuu

SEQ ID NO: 54636 - RNA, 19 nt, Artificial Sequence
  Antisense Oligo
aaaugaaacuggcaugaag

SEQ ID NO: 54637 - RNA, 19 nt, Artificial Sequence
  Sense Oligo
uucaugccaguuucauuuu

SEQ ID NO: 54638 - RNA, 19 nt, Artificial Sequence
  Antisense Oligo
aaaaugaaacuggcaugaa

SEQ ID NO: 54639 - RNA, 19 nt, Artificial Sequence
  Sense Oligo
caugccaguuucauuuuag

SEQ ID NO: 54640 - RNA, 19 nt, Artificial Sequence
  Antisense Oligo
cuaaaaugaaacuggcaug

SEQ ID NO: 54641 - RNA, 19 nt, Artificial Sequence
  Sense Oligo
augccaguuucauuuuagu

SEQ ID NO: 54642 - RNA, 19 nt, Artificial Sequence
  Antisense Oligo
acuaaaaugaaacuggcau

SEQ ID NO: 54643 - RNA, 19 nt, Artificial Sequence
  Sense Oligo
ugccaguuucauuuuaguu

SEQ ID NO: 54644 - RNA, 19 nt, Artificial Sequence
  Antisense Oligo
aacuaaaaugaaacuggca

SEQ ID NO: 54645 - RNA, 19 nt, Artificial Sequence
  Sense Oligo
gccaguuucauuuuaguuu

SEQ ID NO: 54646 - RNA, 19 nt, Artificial Sequence
  Antisense Oligo
aaacuaaaaugaaacuggc

SEQ ID NO: 54647 - RNA, 19 nt, Artificial Sequence
  Sense Oligo
aaaucuugacucuugagga

SEQ ID NO: 54648 - RNA, 19 nt, Artificial Sequence
  Antisense Oligo
uccucaagagucaagauuu

SEQ ID NO: 54649 - RNA, 19 nt, Artificial Sequence
  Sense Oligo
aaucuugacucuugaggau

SEQ ID NO: 54650 - RNA, 19 nt, Artificial Sequence
  Antisense Oligo
auccucaagagucaagauu

SEQ ID NO: 54651 - RNA, 19 nt, Artificial Sequence
  Sense Oligo
aucuugacucuugaggauu

SEQ ID NO: 54652 - RNA, 19 nt, Artificial Sequence
  Antisense Oligo
aauccucaagagucaagau

SEQ ID NO: 54653 - RNA, 19 nt, Artificial Sequence
  Sense Oligo
cuugacucuugaggauuug

SEQ ID NO: 54654 - RNA, 19 nt, Artificial Sequence
  Antisense Oligo
caaauccucaagagucaag

SEQ ID NO: 54655 - RNA, 19 nt, Artificial Sequence
  Sense Oligo
uugacucuugaggauuuga

SEQ ID NO: 54656 - RNA, 19 nt, Artificial Sequence
  Antisense Oligo
ucaaauccucaagagucaa

SEQ ID NO: 54657 - RNA, 19 nt, Artificial Sequence
  Sense Oligo
ugacucuugaggauuugac

SEQ ID NO: 54658 - RNA, 19 nt, Artificial Sequence
  Antisense Oligo
gucaaauccucaagaguca

SEQ ID NO: 54659 - RNA, 19 nt, Artificial Sequence
  Sense Oligo
gacucuugaggauuugacu

SEQ ID NO: 54660 - RNA, 19 nt, Artificial Sequence
  Antisense Oligo
agucaaauccucaagaguc

SEQ ID NO: 54661 - RNA, 19 nt, Artificial Sequence
  Sense Oligo
acucuugaggauuugacuu

SEQ ID NO: 54662 - RNA, 19 nt, Artificial Sequence
  Antisense Oligo
aagucaaauccucaagagu

SEQ ID NO: 54663 - RNA, 19 nt, Artificial Sequence
  Sense Oligo
cucuugaggauuugacuuu

SEQ ID NO: 54664 - RNA, 19 nt, Artificial Sequence
  Antisense Oligo
aaagucaaauccucaagag

SEQ ID NO: 54665 - RNA, 19 nt, Artificial Sequence
  Sense Oligo
ucuugaggauuugacuuuu

SEQ ID NO: 54666 - RNA, 19 nt, Artificial Sequence
  Antisense Oligo
aaaagucaaauccucaaga

SEQ ID NO: 54667 - RNA, 19 nt, Artificial Sequence
  Sense Oligo
cuugaggauuugacuuuuc

SEQ ID NO: 54668 - RNA, 19 nt, Artificial Sequence
  Antisense Oligo
gaaaagucaaauccucaag

SEQ ID NO: 54669 - RNA, 19 nt, Artificial Sequence
  Sense Oligo
uugaggauuugacuuuuca

SEQ ID NO: 54670 - RNA, 19 nt, Artificial Sequence
  Antisense Oligo
ugaaaagucaaauccucaa

SEQ ID NO: 54671 - RNA, 19 nt, Artificial Sequence
  Sense Oligo
ugacuuuucaacguuuugu

SEQ ID NO: 54672 - RNA, 19 nt, Artificial Sequence
  Antisense Oligo
acaaaacguugaaaaguca

SEQ ID NO: 54673 - RNA, 19 nt, Artificial Sequence
  Sense Oligo
gacuuuucaacguuuugug

SEQ ID NO: 54674 - RNA, 19 nt, Artificial Sequence
  Antisense Oligo
cacaaaacguugaaaaguc

SEQ ID NO: 54675 - RNA, 19 nt, Artificial Sequence
  Sense Oligo
aguagacaguugccucaca

SEQ ID NO: 54676 - RNA, 19 nt, Artificial Sequence
  Antisense Oligo
ugugaggcaacugucuacu

SEQ ID NO: 54677 - RNA, 19 nt, Artificial Sequence
  Sense Oligo
guagacaguugccucacag

SEQ ID NO: 54678 - RNA, 19 nt, Artificial Sequence
  Antisense Oligo
cugugaggcaacugucuac

SEQ ID NO: 54679 - RNA, 19 nt, Artificial Sequence
  Sense Oligo
uagacaguugccucacaga

SEQ ID NO: 54680 - RNA, 19 nt, Artificial Sequence
  Antisense Oligo
ucugugaggcaacugucua

SEQ ID NO: 54681 - RNA, 19 nt, Artificial Sequence
  Sense Oligo
agacaguugccucacagaa

SEQ ID NO: 54682 - RNA, 19 nt, Artificial Sequence
  Antisense Oligo
uucugugaggcaacugucu

SEQ ID NO: 54683 - RNA, 19 nt, Artificial Sequence
  Sense Oligo
caagcccuggguuaucagc

SEQ ID NO: 54684 - RNA, 19 nt, Artificial Sequence
  Antisense Oligo
gcugauaacccagggcuug

SEQ ID NO: 54685 - RNA, 19 nt, Artificial Sequence
  Sense Oligo
aagcccuggguuaucagcc

SEQ ID NO: 54686 - RNA, 19 nt, Artificial Sequence
  Antisense Oligo
ggcugauaacccagggcuu

SEQ ID NO: 54687 - RNA, 19 nt, Artificial Sequence
  Sense Oligo
agcccuggguuaucagccg

SEQ ID NO: 54688 - RNA, 19 nt, Artificial Sequence
  Antisense Oligo
cggcugauaacccagggcu

SEQ ID NO: 54689 - RNA, 19 nt, Artificial Sequence
  Sense Oligo
cugggaggaaggaugcaca

SEQ ID NO: 54690 - RNA, 19 nt, Artificial Sequence
  Antisense Oligo
ugugcauccuuccucccag

SEQ ID NO: 54691 - RNA, 19 nt, Artificial Sequence
  Sense Oligo
gaggaaggaugcacaugau

SEQ ID NO: 54692 - RNA, 19 nt, Artificial Sequence
  Antisense Oligo
aucaugugcauccuuccuc

SEQ ID NO: 54693 - RNA, 19 nt, Artificial Sequence
  Sense Oligo
aggaaggaugcacaugaua

SEQ ID NO: 54694 - RNA, 19 nt, Artificial Sequence
  Antisense Oligo
uaucaugugcauccuuccu

SEQ ID NO: 54695 - RNA, 19 nt, Artificial Sequence
  Sense Oligo
ggaaggaugcacaugauac

SEQ ID NO: 54696 - RNA, 19 nt, Artificial Sequence
  Antisense Oligo
guaucaugugcauccuucc

SEQ ID NO: 54697 - RNA, 19 nt, Artificial Sequence
  Sense Oligo
aaggaugcacaugauacag

SEQ ID NO: 54698 - RNA, 19 nt, Artificial Sequence
  Antisense Oligo
cuguaucaugugcauccuu

SEQ ID NO: 54699 - RNA, 19 nt, Artificial Sequence
  Sense Oligo
augcacaugauacaggugu

SEQ ID NO: 54700 - RNA, 19 nt, Artificial Sequence
  Antisense Oligo
acaccuguaucaugugcau

SEQ ID NO: 54701 - RNA, 19 nt, Artificial Sequence
  Sense Oligo
ugcacaugauacagguguc

SEQ ID NO: 54702 - RNA, 19 nt, Artificial Sequence
  Antisense Oligo
gacaccuguaucaugugca

SEQ ID NO: 54703 - RNA, 19 nt, Artificial Sequence
  Sense Oligo
gcacaugauacaggugucc

SEQ ID NO: 54704 - RNA, 19 nt, Artificial Sequence
  Antisense Oligo
ggacaccuguaucaugugc

SEQ ID NO: 54705 - RNA, 19 nt, Artificial Sequence
  Sense Oligo
cacaugauacaggugucca

SEQ ID NO: 54706 - RNA, 19 nt, Artificial Sequence
  Antisense Oligo
uggacaccuguaucaugug

SEQ ID NO: 54707 - RNA, 19 nt, Artificial Sequence
  Sense Oligo
ugauacagguguccagggc

SEQ ID NO: 54708 - RNA, 19 nt, Artificial Sequence
  Antisense Oligo
gcccuggacaccuguauca

SEQ ID NO: 54709 - RNA, 19 nt, Artificial Sequence
  Sense Oligo
caauguugguuggugauga

SEQ ID NO: 54710 - RNA, 19 nt, Artificial Sequence
  Antisense Oligo
ucaucaccaaccaacauug

SEQ ID NO: 54711 - RNA, 19 nt, Artificial Sequence
  Sense Oligo
aauguugguuggugaugau

SEQ ID NO: 54712 - RNA, 19 nt, Artificial Sequence
  Antisense Oligo
aucaucaccaaccaacauu

SEQ ID NO: 54713 - RNA, 19 nt, Artificial Sequence
  Sense Oligo
auguugguuggugaugaua

SEQ ID NO: 54714 - RNA, 19 nt, Artificial Sequence
  Antisense Oligo
uaucaucaccaaccaacau

SEQ ID NO: 54715 - RNA, 19 nt, Artificial Sequence
  Sense Oligo
uguugguuggugaugauaa

SEQ ID NO: 54716 - RNA, 19 nt, Artificial Sequence
  Antisense Oligo
uuaucaucaccaaccaaca

SEQ ID NO: 54717 - RNA, 19 nt, Artificial Sequence
  Sense Oligo
guugguuggugaugauaac

SEQ ID NO: 54718 - RNA, 19 nt, Artificial Sequence
  Antisense Oligo
guuaucaucaccaaccaac

SEQ ID NO: 54719 - RNA, 19 nt, Artificial Sequence
  Sense Oligo
aaaagcuuauauucuccac

SEQ ID NO: 54720 - RNA, 19 nt, Artificial Sequence
  Antisense Oligo
guggagaauauaagcuuuu

SEQ ID NO: 54721 - RNA, 19 nt, Artificial Sequence
  Sense Oligo
aaagcuuauauucuccacu

SEQ ID NO: 54722 - RNA, 19 nt, Artificial Sequence
  Antisense Oligo
aguggagaauauaagcuuu

SEQ ID NO: 54723 - RNA, 19 nt, Artificial Sequence
  Sense Oligo
aagcuuauauucuccacua

SEQ ID NO: 54724 - RNA, 19 nt, Artificial Sequence
  Antisense Oligo
uaguggagaauauaagcuu

SEQ ID NO: 54725 - RNA, 19 nt, Artificial Sequence
  Sense Oligo
agcuuauauucuccacuau

SEQ ID NO: 54726 - RNA, 19 nt, Artificial Sequence
  Antisense Oligo
auaguggagaauauaagcu

SEQ ID NO: 54727 - RNA, 19 nt, Artificial Sequence
  Sense Oligo
gcuuauauucuccacuaug

SEQ ID NO: 54728 - RNA, 19 nt, Artificial Sequence
  Antisense Oligo
cauaguggagaauauaagc

SEQ ID NO: 54729 - RNA, 19 nt, Artificial Sequence
  Sense Oligo
ucuccacuaugagcuugug

SEQ ID NO: 54730 - RNA, 19 nt, Artificial Sequence
  Antisense Oligo
cacaagcucauaguggaga

SEQ ID NO: 54731 - RNA, 19 nt, Artificial Sequence
  Sense Oligo
gcuugugagcuuuugaaua

SEQ ID NO: 54732 - RNA, 19 nt, Artificial Sequence
  Antisense Oligo
uauucaaaagcucacaagc

SEQ ID NO: 54733 - RNA, 19 nt, Artificial Sequence
  Sense Oligo
cuugugagcuuuugaauac

SEQ ID NO: 54734 - RNA, 19 nt, Artificial Sequence
  Antisense Oligo
guauucaaaagcucacaag

SEQ ID NO: 54735 - RNA, 19 nt, Artificial Sequence
  Sense Oligo
uugugagcuuuugaauacu

SEQ ID NO: 54736 - RNA, 19 nt, Artificial Sequence
  Antisense Oligo
aguauucaaaagcucacaa

SEQ ID NO: 54737 - RNA, 19 nt, Artificial Sequence
  Sense Oligo
ugugagcuuuugaauacuu

SEQ ID NO: 54738 - RNA, 19 nt, Artificial Sequence
  Antisense Oligo
aaguauucaaaagcucaca

SEQ ID NO: 54739 - RNA, 19 nt, Artificial Sequence
  Sense Oligo
gugagcuuuugaauacuua

SEQ ID NO: 54740 - RNA, 19 nt, Artificial Sequence
  Antisense Oligo
uaaguauucaaaagcucac

SEQ ID NO: 54741 - RNA, 19 nt, Artificial Sequence
  Sense Oligo
uacuuaaagacauuuuggg

SEQ ID NO: 54742 - RNA, 19 nt, Artificial Sequence
  Antisense Oligo
cccaaaaugucuuuaagua

SEQ ID NO: 54743 - RNA, 19 nt, Artificial Sequence
  Sense Oligo
caaaugugucaaccuuuac

SEQ ID NO: 54744 - RNA, 19 nt, Artificial Sequence
  Antisense Oligo
guaaagguugacacauuug

SEQ ID NO: 54745 - RNA, 19 nt, Artificial Sequence
  Sense Oligo
aaaugugucaaccuuuaca

SEQ ID NO: 54746 - RNA, 19 nt, Artificial Sequence
  Antisense Oligo
uguaaagguugacacauuu

SEQ ID NO: 54747 - RNA, 19 nt, Artificial Sequence
  Sense Oligo
ccaaaugaccaaugccuga

SEQ ID NO: 54748 - RNA, 19 nt, Artificial Sequence
  Antisense Oligo
ucaggcauuggucauuugg

SEQ ID NO: 54749 - RNA, 19 nt, Artificial Sequence
  Sense Oligo
caaaugaccaaugccugau

SEQ ID NO: 54750 - RNA, 19 nt, Artificial Sequence
  Antisense Oligo
aucaggcauuggucauuug

SEQ ID NO: 54751 - RNA, 19 nt, Artificial Sequence
  Sense Oligo
aaaugaccaaugccugaug

SEQ ID NO: 54752 - RNA, 19 nt, Artificial Sequence
  Antisense Oligo
caucaggcauuggucauuu

SEQ ID NO: 54753 - RNA, 19 nt, Artificial Sequence
  Sense Oligo
aaugaccaaugccugaugu

SEQ ID NO: 54754 - RNA, 19 nt, Artificial Sequence
  Antisense Oligo
acaucaggcauuggucauu

SEQ ID NO: 54755 - RNA, 19 nt, Artificial Sequence
  Sense Oligo
augaccaaugccugauguc

SEQ ID NO: 54756 - RNA, 19 nt, Artificial Sequence
  Antisense Oligo
gacaucaggcauuggucau

SEQ ID NO: 54757 - RNA, 19 nt, Artificial Sequence
  Sense Oligo
uacaguuucaggcuccaca

SEQ ID NO: 54758 - RNA, 19 nt, Artificial Sequence
  Antisense Oligo
uguggagccugaaacugua

SEQ ID NO: 54759 - RNA, 19 nt, Artificial Sequence
  Sense Oligo
guuucaggcuccacauugc

SEQ ID NO: 54760 - RNA, 19 nt, Artificial Sequence
  Antisense Oligo
gcaauguggagccugaaac

SEQ ID NO: 54761 - RNA, 19 nt, Artificial Sequence
  Sense Oligo
uucaggcuccacauugcaa

SEQ ID NO: 54762 - RNA, 19 nt, Artificial Sequence
  Antisense Oligo
uugcaauguggagccugaa

SEQ ID NO: 54763 - RNA, 19 nt, Artificial Sequence
  Sense Oligo
ucaggcuccacauugcaac

SEQ ID NO: 54764 - RNA, 19 nt, Artificial Sequence
  Antisense Oligo
guugcaauguggagccuga

SEQ ID NO: 54765 - RNA, 19 nt, Artificial Sequence
  Sense Oligo
caggcuccacauugcaacu

SEQ ID NO: 54766 - RNA, 19 nt, Artificial Sequence
  Antisense Oligo
aguugcaauguggagccug

SEQ ID NO: 54767 - RNA, 19 nt, Artificial Sequence
  Sense Oligo
aggcuccacauugcaacua

SEQ ID NO: 54768 - RNA, 19 nt, Artificial Sequence
  Antisense Oligo
uaguugcaauguggagccu

SEQ ID NO: 54769 - RNA, 19 nt, Artificial Sequence
  Sense Oligo
uugcaacuaaccucuagac

SEQ ID NO: 54770 - RNA, 19 nt, Artificial Sequence
  Antisense Oligo
gucuagagguuaguugcaa

SEQ ID NO: 54771 - RNA, 19 nt, Artificial Sequence
  Sense Oligo
ugcaacuaaccucuagaca

SEQ ID NO: 54772 - RNA, 19 nt, Artificial Sequence
  Antisense Oligo
ugucuagagguuaguugca

SEQ ID NO: 54773 - RNA, 19 nt, Artificial Sequence
  Sense Oligo
acuaaccucuagacaugac

SEQ ID NO: 54774 - RNA, 19 nt, Artificial Sequence
  Antisense Oligo
gucaugucuagagguuagu

SEQ ID NO: 54775 - RNA, 19 nt, Artificial Sequence
  Sense Oligo
cuaaccucuagacaugacc

SEQ ID NO: 54776 - RNA, 19 nt, Artificial Sequence
  Antisense Oligo
ggucaugucuagagguuag

SEQ ID NO: 54777 - RNA, 19 nt, Artificial Sequence
  Sense Oligo
uaaccucuagacaugacca

SEQ ID NO: 54778 - RNA, 19 nt, Artificial Sequence
  Antisense Oligo
uggucaugucuagagguua

SEQ ID NO: 54779 - RNA, 19 nt, Artificial Sequence
  Sense Oligo
aaccucuagacaugaccau

SEQ ID NO: 54780 - RNA, 19 nt, Artificial Sequence
  Antisense Oligo
auggucaugucuagagguu

SEQ ID NO: 54781 - RNA, 19 nt, Artificial Sequence
  Sense Oligo
accucuagacaugaccauu

SEQ ID NO: 54782 - RNA, 19 nt, Artificial Sequence
  Antisense Oligo
aauggucaugucuagaggu

SEQ ID NO: 54783 - RNA, 19 nt, Artificial Sequence
  Sense Oligo
ccucuagacaugaccauuu

SEQ ID NO: 54784 - RNA, 19 nt, Artificial Sequence
  Antisense Oligo
aaauggucaugucuagagg

SEQ ID NO: 54785 - RNA, 19 nt, Artificial Sequence
  Sense Oligo
cucuagacaugaccauuua

SEQ ID NO: 54786 - RNA, 19 nt, Artificial Sequence
  Antisense Oligo
uaaauggucaugucuagag

SEQ ID NO: 54787 - RNA, 19 nt, Artificial Sequence
  Sense Oligo
ucuagacaugaccauuuau

SEQ ID NO: 54788 - RNA, 19 nt, Artificial Sequence
  Antisense Oligo
auaaauggucaugucuaga

SEQ ID NO: 54789 - RNA, 19 nt, Artificial Sequence
  Sense Oligo
cuagacaugaccauuuauc

SEQ ID NO: 54790 - RNA, 19 nt, Artificial Sequence
  Antisense Oligo
gauaaauggucaugucuag

SEQ ID NO: 54791 - RNA, 19 nt, Artificial Sequence
  Sense Oligo
uagacaugaccauuuauca

SEQ ID NO: 54792 - RNA, 19 nt, Artificial Sequence
  Antisense Oligo
ugauaaauggucaugucua

SEQ ID NO: 54793 - RNA, 19 nt, Artificial Sequence
  Sense Oligo
agacaugaccauuuaucac

SEQ ID NO: 54794 - RNA, 19 nt, Artificial Sequence
  Antisense Oligo
gugauaaauggucaugucu

SEQ ID NO: 54795 - RNA, 19 nt, Artificial Sequence
  Sense Oligo
gacaugaccauuuaucacu

SEQ ID NO: 54796 - RNA, 19 nt, Artificial Sequence
  Antisense Oligo
agugauaaauggucauguc

SEQ ID NO: 54797 - RNA, 19 nt, Artificial Sequence
  Sense Oligo
caugaccauuuaucacugu

SEQ ID NO: 54798 - RNA, 19 nt, Artificial Sequence
  Antisense Oligo
acagugauaaauggucaug

SEQ ID NO: 54799 - RNA, 19 nt, Artificial Sequence
  Sense Oligo
accauuuaucacugugggc

SEQ ID NO: 54800 - RNA, 19 nt, Artificial Sequence
  Antisense Oligo
gcccacagugauaaauggu

SEQ ID NO: 54801 - RNA, 19 nt, Artificial Sequence
  Sense Oligo
ccauuuaucacugugggca

SEQ ID NO: 54802 - RNA, 19 nt, Artificial Sequence
  Antisense Oligo
ugcccacagugauaaaugg

SEQ ID NO: 54803 - RNA, 19 nt, Artificial Sequence
  Sense Oligo
cauuuaucacugugggcac

SEQ ID NO: 54804 - RNA, 19 nt, Artificial Sequence
  Antisense Oligo
gugcccacagugauaaaug

SEQ ID NO: 54805 - RNA, 19 nt, Artificial Sequence
  Sense Oligo
ugugggcacagcauuaagg

SEQ ID NO: 54806 - RNA, 19 nt, Artificial Sequence
  Antisense Oligo
ccuuaaugcugugcccaca

SEQ ID NO: 54807 - RNA, 19 nt, Artificial Sequence
  Sense Oligo
gugggcacagcauuaagga

SEQ ID NO: 54808 - RNA, 19 nt, Artificial Sequence
  Antisense Oligo
uccuuaaugcugugcccac

SEQ ID NO: 54809 - RNA, 19 nt, Artificial Sequence
  Sense Oligo
ugggcacagcauuaaggaa

SEQ ID NO: 54810 - RNA, 19 nt, Artificial Sequence
  Antisense Oligo
uuccuuaaugcugugccca

SEQ ID NO: 54811 - RNA, 19 nt, Artificial Sequence
  Sense Oligo
gggcacagcauuaaggaau

SEQ ID NO: 54812 - RNA, 19 nt, Artificial Sequence
  Antisense Oligo
auuccuuaaugcugugccc

SEQ ID NO: 54813 - RNA, 19 nt, Artificial Sequence
  Sense Oligo
ggcacagcauuaaggaaua

SEQ ID NO: 54814 - RNA, 19 nt, Artificial Sequence
  Antisense Oligo
uauuccuuaaugcugugcc

SEQ ID NO: 54815 - RNA, 19 nt, Artificial Sequence
  Sense Oligo
gcacagcauuaaggaauaa

SEQ ID NO: 54816 - RNA, 19 nt, Artificial Sequence
  Antisense Oligo
uuauuccuuaaugcugugc

SEQ ID NO: 54817 - RNA, 19 nt, Artificial Sequence
  Sense Oligo
uuaaggaauaauagccaca

SEQ ID NO: 54818 - RNA, 19 nt, Artificial Sequence
  Antisense Oligo
uguggcuauuauuccuuaa

SEQ ID NO: 54819 - RNA, 19 nt, Artificial Sequence
  Sense Oligo
uuaaaauguuccucgcuau

SEQ ID NO: 54820 - RNA, 19 nt, Artificial Sequence
  Antisense Oligo
auagcgaggaacauuuuaa

SEQ ID NO: 54821 - RNA, 19 nt, Artificial Sequence
  Sense Oligo
uaaaauguuccucgcuauu

SEQ ID NO: 54822 - RNA, 19 nt, Artificial Sequence
  Antisense Oligo
aauagcgaggaacauuuua

SEQ ID NO: 54823 - RNA, 19 nt, Artificial Sequence
  Sense Oligo
aaaauguuccucgcuauuc

SEQ ID NO: 54824 - RNA, 19 nt, Artificial Sequence
  Antisense Oligo
gaauagcgaggaacauuuu

SEQ ID NO: 54825 - RNA, 19 nt, Artificial Sequence
  Sense Oligo
aaauguuccucgcuauucc

SEQ ID NO: 54826 - RNA, 19 nt, Artificial Sequence
  Antisense Oligo
ggaauagcgaggaacauuu

SEQ ID NO: 54827 - RNA, 19 nt, Artificial Sequence
  Sense Oligo
aauguuccucgcuauuccg

SEQ ID NO: 54828 - RNA, 19 nt, Artificial Sequence
  Antisense Oligo
cggaauagcgaggaacauu

SEQ ID NO: 54829 - RNA, 19 nt, Artificial Sequence
  Sense Oligo
auguuccucgcuauuccga

SEQ ID NO: 54830 - RNA, 19 nt, Artificial Sequence
  Antisense Oligo
ucggaauagcgaggaacau

SEQ ID NO: 54831 - RNA, 19 nt, Artificial Sequence
  Sense Oligo
ucgcuauuccgaguauaug

SEQ ID NO: 54832 - RNA, 19 nt, Artificial Sequence
  Antisense Oligo
cauauacucggaauagcga

SEQ ID NO: 54833 - RNA, 19 nt, Artificial Sequence
  Sense Oligo
cgcuauuccgaguauauga

SEQ ID NO: 54834 - RNA, 19 nt, Artificial Sequence
  Antisense Oligo
ucauauacucggaauagcg

SEQ ID NO: 54835 - RNA, 19 nt, Artificial Sequence
  Sense Oligo
gcuauuccgaguauaugag

SEQ ID NO: 54836 - RNA, 19 nt, Artificial Sequence
  Antisense Oligo
cucauauacucggaauagc

SEQ ID NO: 54837 - RNA, 19 nt, Artificial Sequence
  Sense Oligo
cuauuccgaguauaugagg

SEQ ID NO: 54838 - RNA, 19 nt, Artificial Sequence
  Antisense Oligo
ccucauauacucggaauag

SEQ ID NO: 54839 - RNA, 19 nt, Artificial Sequence
  Sense Oligo
uauuccgaguauaugagga

SEQ ID NO: 54840 - RNA, 19 nt, Artificial Sequence
  Antisense Oligo
uccucauauacucggaaua

SEQ ID NO: 54841 - RNA, 19 nt, Artificial Sequence
  Sense Oligo
auuccgaguauaugaggac

SEQ ID NO: 54842 - RNA, 19 nt, Artificial Sequence
  Antisense Oligo
guccucauauacucggaau

SEQ ID NO: 54843 - RNA, 19 nt, Artificial Sequence
  Sense Oligo
uuccgaguauaugaggaca

SEQ ID NO: 54844 - RNA, 19 nt, Artificial Sequence
  Antisense Oligo
uguccucauauacucggaa

SEQ ID NO: 54845 - RNA, 19 nt, Artificial Sequence
  Sense Oligo
uccgaguauaugaggacag

SEQ ID NO: 54846 - RNA, 19 nt, Artificial Sequence
  Antisense Oligo
cuguccucauauacucgga

SEQ ID NO: 54847 - RNA, 19 nt, Artificial Sequence
  Sense Oligo
ccgaguauaugaggacaga

SEQ ID NO: 54848 - RNA, 19 nt, Artificial Sequence
  Antisense Oligo
ucuguccucauauacucgg

SEQ ID NO: 54849 - RNA, 19 nt, Artificial Sequence
  Sense Oligo
cgaguauaugaggacagau

SEQ ID NO: 54850 - RNA, 19 nt, Artificial Sequence
  Antisense Oligo
aucuguccucauauacucg

SEQ ID NO: 54851 - RNA, 19 nt, Artificial Sequence
  Sense Oligo
gaguauaugaggacagauu

SEQ ID NO: 54852 - RNA, 19 nt, Artificial Sequence
  Antisense Oligo
aaucuguccucauauacuc

SEQ ID NO: 54853 - RNA, 19 nt, Artificial Sequence
  Sense Oligo
aguauaugaggacagauuu

SEQ ID NO: 54854 - RNA, 19 nt, Artificial Sequence
  Antisense Oligo
aaaucuguccucauauacu

SEQ ID NO: 54855 - RNA, 19 nt, Artificial Sequence
  Sense Oligo
uauaugaggacagauuuuc

SEQ ID NO: 54856 - RNA, 19 nt, Artificial Sequence
  Antisense Oligo
gaaaaucuguccucauaua

SEQ ID NO: 54857 - RNA, 19 nt, Artificial Sequence
  Sense Oligo
cucccauaugcugcagcga

SEQ ID NO: 54858 - RNA, 19 nt, Artificial Sequence
  Antisense Oligo
ucgcugcagcauaugggag

SEQ ID NO: 54859 - RNA, 19 nt, Artificial Sequence
  Sense Oligo
ucccauaugcugcagcgau

SEQ ID NO: 54860 - RNA, 19 nt, Artificial Sequence
  Antisense Oligo
aucgcugcagcauauggga

SEQ ID NO: 54861 - RNA, 19 nt, Artificial Sequence
  Sense Oligo
cccauaugcugcagcgaug

SEQ ID NO: 54862 - RNA, 19 nt, Artificial Sequence
  Antisense Oligo
caucgcugcagcauauggg

SEQ ID NO: 54863 - RNA, 19 nt, Artificial Sequence
  Sense Oligo
ccagggccagcacaggaau

SEQ ID NO: 54864 - RNA, 19 nt, Artificial Sequence
  Antisense Oligo
auuccugugcuggcccugg

SEQ ID NO: 54865 - RNA, 19 nt, Artificial Sequence
  Sense Oligo
cagggccagcacaggaaug

SEQ ID NO: 54866 - RNA, 19 nt, Artificial Sequence
  Antisense Oligo
cauuccugugcuggcccug

SEQ ID NO: 54867 - RNA, 19 nt, Artificial Sequence
  Sense Oligo
agggccagcacaggaaugg

SEQ ID NO: 54868 - RNA, 19 nt, Artificial Sequence
  Antisense Oligo
ccauuccugugcuggcccu

SEQ ID NO: 54869 - RNA, 19 nt, Artificial Sequence
  Sense Oligo
gggccagcacaggaaugga

SEQ ID NO: 54870 - RNA, 19 nt, Artificial Sequence
  Antisense Oligo
uccauuccugugcuggccc

SEQ ID NO: 54871 - RNA, 19 nt, Artificial Sequence
  Sense Oligo
ggccagcacaggaauggaa

SEQ ID NO: 54872 - RNA, 19 nt, Artificial Sequence
  Antisense Oligo
uuccauuccugugcuggcc

SEQ ID NO: 54873 - RNA, 19 nt, Artificial Sequence
  Sense Oligo
gccagcacaggaauggaag

SEQ ID NO: 54874 - RNA, 19 nt, Artificial Sequence
  Antisense Oligo
cuuccauuccugugcuggc

SEQ ID NO: 54875 - RNA, 19 nt, Artificial Sequence
  Sense Oligo
ccagcacaggaauggaaga

SEQ ID NO: 54876 - RNA, 19 nt, Artificial Sequence
  Antisense Oligo
ucuuccauuccugugcugg

SEQ ID NO: 54877 - RNA, 19 nt, Artificial Sequence
  Sense Oligo
agcacaggaauggaagacc

SEQ ID NO: 54878 - RNA, 19 nt, Artificial Sequence
  Antisense Oligo
ggucuuccauuccugugcu

SEQ ID NO: 54879 - RNA, 19 nt, Artificial Sequence
  Sense Oligo
aaccacucuucucacggau

SEQ ID NO: 54880 - RNA, 19 nt, Artificial Sequence
  Antisense Oligo
auccgugagaagagugguu

SEQ ID NO: 54881 - RNA, 19 nt, Artificial Sequence
  Sense Oligo
accacucuucucacggauu

SEQ ID NO: 54882 - RNA, 19 nt, Artificial Sequence
  Antisense Oligo
aauccgugagaagaguggu

SEQ ID NO: 54883 - RNA, 19 nt, Artificial Sequence
  Sense Oligo
ccacucuucucacggauuc

SEQ ID NO: 54884 - RNA, 19 nt, Artificial Sequence
  Antisense Oligo
gaauccgugagaagagugg

SEQ ID NO: 54885 - RNA, 19 nt, Artificial Sequence
  Sense Oligo
cacucuucucacggauuca

SEQ ID NO: 54886 - RNA, 19 nt, Artificial Sequence
  Antisense Oligo
ugaauccgugagaagagug

SEQ ID NO: 54887 - RNA, 19 nt, Artificial Sequence
  Sense Oligo
acucuucucacggauucau

SEQ ID NO: 54888 - RNA, 19 nt, Artificial Sequence
  Antisense Oligo
augaauccgugagaagagu

SEQ ID NO: 54889 - RNA, 19 nt, Artificial Sequence
  Sense Oligo
cucuucucacggauucaug

SEQ ID NO: 54890 - RNA, 19 nt, Artificial Sequence
  Antisense Oligo
caugaauccgugagaagag

SEQ ID NO: 54891 - RNA, 19 nt, Artificial Sequence
  Sense Oligo
ucuucucacggauucaugu

SEQ ID NO: 54892 - RNA, 19 nt, Artificial Sequence
  Antisense Oligo
acaugaauccgugagaaga

SEQ ID NO: 54893 - RNA, 19 nt, Artificial Sequence
  Sense Oligo
cuucucacggauucauguu

SEQ ID NO: 54894 - RNA, 19 nt, Artificial Sequence
  Antisense Oligo
aacaugaauccgugagaag

SEQ ID NO: 54895 - RNA, 19 nt, Artificial Sequence
  Sense Oligo
uucucacggauucauguuu

SEQ ID NO: 54896 - RNA, 19 nt, Artificial Sequence
  Antisense Oligo
aaacaugaauccgugagaa

SEQ ID NO: 54897 - RNA, 19 nt, Artificial Sequence
  Sense Oligo
ucucacggauucauguuuu

SEQ ID NO: 54898 - RNA, 19 nt, Artificial Sequence
  Antisense Oligo
aaaacaugaauccgugaga

SEQ ID NO: 54899 - RNA, 19 nt, Artificial Sequence
  Sense Oligo
cucacggauucauguuuug

SEQ ID NO: 54900 - RNA, 19 nt, Artificial Sequence
  Antisense Oligo
caaaacaugaauccgugag

SEQ ID NO: 54901 - RNA, 19 nt, Artificial Sequence
  Sense Oligo
ucacggauucauguuuugg

SEQ ID NO: 54902 - RNA, 19 nt, Artificial Sequence
  Antisense Oligo
ccaaaacaugaauccguga

SEQ ID NO: 54903 - RNA, 19 nt, Artificial Sequence
  Sense Oligo
cacggauucauguuuugga

SEQ ID NO: 54904 - RNA, 19 nt, Artificial Sequence
  Antisense Oligo
uccaaaacaugaauccgug

SEQ ID NO: 54905 - RNA, 19 nt, Artificial Sequence
  Sense Oligo
acggauucauguuuuggaa

SEQ ID NO: 54906 - RNA, 19 nt, Artificial Sequence
  Antisense Oligo
uuccaaaacaugaauccgu

SEQ ID NO: 54907 - RNA, 19 nt, Artificial Sequence
  Sense Oligo
acccacauaaaagcucuuc

SEQ ID NO: 54908 - RNA, 19 nt, Artificial Sequence
  Antisense Oligo
gaagagcuuuuaugugggu

SEQ ID NO: 54909 - RNA, 19 nt, Artificial Sequence
  Sense Oligo
cccacauaaaagcucuucg

SEQ ID NO: 54910 - RNA, 19 nt, Artificial Sequence
  Antisense Oligo
cgaagagcuuuuauguggg

SEQ ID NO: 54911 - RNA, 19 nt, Artificial Sequence
  Sense Oligo
ccacauaaaagcucuucgg

SEQ ID NO: 54912 - RNA, 19 nt, Artificial Sequence
  Antisense Oligo
ccgaagagcuuuuaugugg

SEQ ID NO: 54913 - RNA, 19 nt, Artificial Sequence
  Sense Oligo
cacauaaaagcucuucggg

SEQ ID NO: 54914 - RNA, 19 nt, Artificial Sequence
  Antisense Oligo
cccgaagagcuuuuaugug

SEQ ID NO: 54915 - RNA, 19 nt, Artificial Sequence
  Sense Oligo
aaccaaaguuugaggacag

SEQ ID NO: 54916 - RNA, 19 nt, Artificial Sequence
  Antisense Oligo
cuguccucaaacuuugguu

SEQ ID NO: 54917 - RNA, 19 nt, Artificial Sequence
  Sense Oligo
accaaaguuugaggacagc

SEQ ID NO: 54918 - RNA, 19 nt, Artificial Sequence
  Antisense Oligo
gcuguccucaaacuuuggu

SEQ ID NO: 54919 - RNA, 19 nt, Artificial Sequence
  Sense Oligo
caaaguuugaggacagcug

SEQ ID NO: 54920 - RNA, 19 nt, Artificial Sequence
  Antisense Oligo
cagcuguccucaaacuuug

SEQ ID NO: 54921 - RNA, 19 nt, Artificial Sequence
  Sense Oligo
ugaggacagcuggucuaaa

SEQ ID NO: 54922 - RNA, 19 nt, Artificial Sequence
  Antisense Oligo
uuuagaccagcuguccuca

SEQ ID NO: 54923 - RNA, 19 nt, Artificial Sequence
  Sense Oligo
gaggacagcuggucuaaaa

SEQ ID NO: 54924 - RNA, 19 nt, Artificial Sequence
  Antisense Oligo
uuuuagaccagcuguccuc

SEQ ID NO: 54925 - RNA, 19 nt, Artificial Sequence
  Sense Oligo
ggacagcuggucuaaaaug

SEQ ID NO: 54926 - RNA, 19 nt, Artificial Sequence
  Antisense Oligo
cauuuuagaccagcugucc

SEQ ID NO: 54927 - RNA, 19 nt, Artificial Sequence
  Sense Oligo
gacagcuggucuaaaaugu

SEQ ID NO: 54928 - RNA, 19 nt, Artificial Sequence
  Antisense Oligo
acauuuuagaccagcuguc

SEQ ID NO: 54929 - RNA, 19 nt, Artificial Sequence
  Sense Oligo
acagcuggucuaaaaugug

SEQ ID NO: 54930 - RNA, 19 nt, Artificial Sequence
  Antisense Oligo
cacauuuuagaccagcugu

SEQ ID NO: 54931 - RNA, 19 nt, Artificial Sequence
  Sense Oligo
ugugaguuuuauauuccuc

SEQ ID NO: 54932 - RNA, 19 nt, Artificial Sequence
  Antisense Oligo
gaggaauauaaaacucaca

SEQ ID NO: 54933 - RNA, 19 nt, Artificial Sequence
  Sense Oligo
guuuuauauuccuccagua

SEQ ID NO: 54934 - RNA, 19 nt, Artificial Sequence
  Antisense Oligo
uacuggaggaauauaaaac

SEQ ID NO: 54935 - RNA, 19 nt, Artificial Sequence
  Sense Oligo
auuccuccaguauuaugcu

SEQ ID NO: 54936 - RNA, 19 nt, Artificial Sequence
  Antisense Oligo
agcauaauacuggaggaau

SEQ ID NO: 54937 - RNA, 19 nt, Artificial Sequence
  Sense Oligo
uuccuccaguauuaugcua

SEQ ID NO: 54938 - RNA, 19 nt, Artificial Sequence
  Antisense Oligo
uagcauaauacuggaggaa

SEQ ID NO: 54939 - RNA, 19 nt, Artificial Sequence
  Sense Oligo
uccuccaguauuaugcuaa

SEQ ID NO: 54940 - RNA, 19 nt, Artificial Sequence
  Antisense Oligo
uuagcauaauacuggagga

SEQ ID NO: 54941 - RNA, 19 nt, Artificial Sequence
  Sense Oligo
ccaguauuaugcuaaaagg

SEQ ID NO: 54942 - RNA, 19 nt, Artificial Sequence
  Antisense Oligo
ccuuuuagcauaauacugg

SEQ ID NO: 54943 - RNA, 19 nt, Artificial Sequence
  Sense Oligo
caguauuaugcuaaaaggu

SEQ ID NO: 54944 - RNA, 19 nt, Artificial Sequence
  Antisense Oligo
accuuuuagcauaauacug

SEQ ID NO: 54945 - RNA, 19 nt, Artificial Sequence
  Sense Oligo
uaugcuaaaagguuuucca

SEQ ID NO: 54946 - RNA, 19 nt, Artificial Sequence
  Antisense Oligo
uggaaaaccuuuuagcaua

SEQ ID NO: 54947 - RNA, 19 nt, Artificial Sequence
  Sense Oligo
augcuaaaagguuuuccau

SEQ ID NO: 54948 - RNA, 19 nt, Artificial Sequence
  Antisense Oligo
auggaaaaccuuuuagcau

SEQ ID NO: 54949 - RNA, 19 nt, Artificial Sequence
  Sense Oligo
ugcuaaaagguuuuccaua

SEQ ID NO: 54950 - RNA, 19 nt, Artificial Sequence
  Antisense Oligo
uauggaaaaccuuuuagca

SEQ ID NO: 54951 - RNA, 19 nt, Artificial Sequence
  Sense Oligo
gcuaaaagguuuuccauaa

SEQ ID NO: 54952 - RNA, 19 nt, Artificial Sequence
  Antisense Oligo
uuauggaaaaccuuuuagc

SEQ ID NO: 54953 - RNA, 19 nt, Artificial Sequence
  Sense Oligo
aaccacguauauguaugua

SEQ ID NO: 54954 - RNA, 19 nt, Artificial Sequence
  Antisense Oligo
uacauacauauacgugguu

SEQ ID NO: 54955 - RNA, 19 nt, Artificial Sequence
  Sense Oligo
accacguauauguauguau

SEQ ID NO: 54956 - RNA, 19 nt, Artificial Sequence
  Antisense Oligo
auacauacauauacguggu

SEQ ID NO: 54957 - RNA, 19 nt, Artificial Sequence
  Sense Oligo
uuuuaguaagguaugucuc

SEQ ID NO: 54958 - RNA, 19 nt, Artificial Sequence
  Antisense Oligo
gagacauaccuuacuaaaa

SEQ ID NO: 54959 - RNA, 19 nt, Artificial Sequence
  Sense Oligo
aguaagguaugucuccaga

SEQ ID NO: 54960 - RNA, 19 nt, Artificial Sequence
  Antisense Oligo
ucuggagacauaccuuacu

SEQ ID NO: 54961 - RNA, 19 nt, Artificial Sequence
  Sense Oligo
guaagguaugucuccagau

SEQ ID NO: 54962 - RNA, 19 nt, Artificial Sequence
  Antisense Oligo
aucuggagacauaccuuac

SEQ ID NO: 54963 - RNA, 19 nt, Artificial Sequence
  Sense Oligo
uaagguaugucuccagauc

SEQ ID NO: 54964 - RNA, 19 nt, Artificial Sequence
  Antisense Oligo
gaucuggagacauaccuua

SEQ ID NO: 54965 - RNA, 19 nt, Artificial Sequence
  Sense Oligo
aagguaugucuccagaucu

SEQ ID NO: 54966 - RNA, 19 nt, Artificial Sequence
  Antisense Oligo
agaucuggagacauaccuu

SEQ ID NO: 54967 - RNA, 19 nt, Artificial Sequence
  Sense Oligo
agguaugucuccagaucug

SEQ ID NO: 54968 - RNA, 19 nt, Artificial Sequence
  Antisense Oligo
cagaucuggagacauaccu

SEQ ID NO: 54969 - RNA, 19 nt, Artificial Sequence
  Sense Oligo
gguaugucuccagaucuga

SEQ ID NO: 54970 - RNA, 19 nt, Artificial Sequence
  Antisense Oligo
ucagaucuggagacauacc

SEQ ID NO: 54971 - RNA, 19 nt, Artificial Sequence
  Sense Oligo
guaugucuccagaucugag

SEQ ID NO: 54972 - RNA, 19 nt, Artificial Sequence
  Antisense Oligo
cucagaucuggagacauac

SEQ ID NO: 54973 - RNA, 19 nt, Artificial Sequence
  Sense Oligo
ucugcagcuuucaugaugu

SEQ ID NO: 54974 - RNA, 19 nt, Artificial Sequence
  Antisense Oligo
acaucaugaaagcugcaga

SEQ ID NO: 54975 - RNA, 19 nt, Artificial Sequence
  Sense Oligo
cugcagcuuucaugaugua

SEQ ID NO: 54976 - RNA, 19 nt, Artificial Sequence
  Antisense Oligo
uacaucaugaaagcugcag

SEQ ID NO: 54977 - RNA, 19 nt, Artificial Sequence
  Sense Oligo
cagcuuucaugauguaaaa

SEQ ID NO: 54978 - RNA, 19 nt, Artificial Sequence
  Antisense Oligo
uuuuacaucaugaaagcug

SEQ ID NO: 54979 - RNA, 19 nt, Artificial Sequence
  Sense Oligo
auucaggaauauuugaccc

SEQ ID NO: 54980 - RNA, 19 nt, Artificial Sequence
  Antisense Oligo
gggucaaauauuccugaau

SEQ ID NO: 54981 - RNA, 19 nt, Artificial Sequence
  Sense Oligo
uucaggaauauuugacccu

SEQ ID NO: 54982 - RNA, 19 nt, Artificial Sequence
  Antisense Oligo
agggucaaauauuccugaa

SEQ ID NO: 54983 - RNA, 19 nt, Artificial Sequence
  Sense Oligo
aggaauauuugacccuguu

SEQ ID NO: 54984 - RNA, 19 nt, Artificial Sequence
  Antisense Oligo
aacagggucaaauauuccu

SEQ ID NO: 54985 - RNA, 19 nt, Artificial Sequence
  Sense Oligo
ggaauauuugacccuguua

SEQ ID NO: 54986 - RNA, 19 nt, Artificial Sequence
  Antisense Oligo
uaacagggucaaauauucc

SEQ ID NO: 54987 - RNA, 19 nt, Artificial Sequence
  Sense Oligo
gaauauuugacccuguuaa

SEQ ID NO: 54988 - RNA, 19 nt, Artificial Sequence
  Antisense Oligo
uuaacagggucaaauauuc

SEQ ID NO: 54989 - RNA, 19 nt, Artificial Sequence
  Sense Oligo
cuguacaugcucuucauca

SEQ ID NO: 54990 - RNA, 19 nt, Artificial Sequence
  Antisense Oligo
ugaugaagagcauguacag

SEQ ID NO: 54991 - RNA, 19 nt, Artificial Sequence
  Sense Oligo
uguacaugcucuucaucaa

SEQ ID NO: 54992 - RNA, 19 nt, Artificial Sequence
  Antisense Oligo
uugaugaagagcauguaca

SEQ ID NO: 54993 - RNA, 19 nt, Artificial Sequence
  Sense Oligo
guacaugcucuucaucaac

SEQ ID NO: 54994 - RNA, 19 nt, Artificial Sequence
  Antisense Oligo
guugaugaagagcauguac

SEQ ID NO: 54995 - RNA, 19 nt, Artificial Sequence
  Sense Oligo
uacaugcucuucaucaacu

SEQ ID NO: 54996 - RNA, 19 nt, Artificial Sequence
  Antisense Oligo
aguugaugaagagcaugua

SEQ ID NO: 54997 - RNA, 19 nt, Artificial Sequence
  Sense Oligo
acaugcucuucaucaacug

SEQ ID NO: 54998 - RNA, 19 nt, Artificial Sequence
  Antisense Oligo
caguugaugaagagcaugu

SEQ ID NO: 54999 - RNA, 19 nt, Artificial Sequence
  Sense Oligo
cucuucaucaacugccugg

SEQ ID NO: 55000 - RNA, 19 nt, Artificial Sequence
  Antisense Oligo
ccaggcaguugaugaagag

SEQ ID NO: 55001 - RNA, 19 nt, Artificial Sequence
  Sense Oligo
ucuucaucaacugccugga

SEQ ID NO: 55002 - RNA, 19 nt, Artificial Sequence
  Antisense Oligo
uccaggcaguugaugaaga

SEQ ID NO: 55003 - RNA, 19 nt, Artificial Sequence
  Sense Oligo
cuucaucaacugccuggag

SEQ ID NO: 55004 - RNA, 19 nt, Artificial Sequence
  Antisense Oligo
cuccaggcaguugaugaag

SEQ ID NO: 55005 - RNA, 19 nt, Artificial Sequence
  Sense Oligo
uucaucaacugccuggagg

SEQ ID NO: 55006 - RNA, 19 nt, Artificial Sequence
  Antisense Oligo
ccuccaggcaguugaugaa

SEQ ID NO: 55007 - RNA, 19 nt, Artificial Sequence
  Sense Oligo
ucaucaacugccuggaggu

SEQ ID NO: 55008 - RNA, 19 nt, Artificial Sequence
  Antisense Oligo
accuccaggcaguugauga

SEQ ID NO: 55009 - RNA, 19 nt, Artificial Sequence
  Sense Oligo
caucaacugccuggaggua

SEQ ID NO: 55010 - RNA, 19 nt, Artificial Sequence
  Antisense Oligo
uaccuccaggcaguugaug

SEQ ID NO: 55011 - RNA, 19 nt, Artificial Sequence
  Sense Oligo
aucaacugccuggagguaa

SEQ ID NO: 55012 - RNA, 19 nt, Artificial Sequence
  Antisense Oligo
uuaccuccaggcaguugau

SEQ ID NO: 55013 - RNA, 19 nt, Artificial Sequence
  Sense Oligo
ucaacugccuggagguaag

SEQ ID NO: 55014 - RNA, 19 nt, Artificial Sequence
  Antisense Oligo
cuuaccuccaggcaguuga

SEQ ID NO: 55015 - RNA, 19 nt, Artificial Sequence
  Sense Oligo
caacugccuggagguaagu

SEQ ID NO: 55016 - RNA, 19 nt, Artificial Sequence
  Antisense Oligo
acuuaccuccaggcaguug

SEQ ID NO: 55017 - RNA, 19 nt, Artificial Sequence
  Sense Oligo
aacugccuggagguaagug

SEQ ID NO: 55018 - RNA, 19 nt, Artificial Sequence
  Antisense Oligo
cacuuaccuccaggcaguu

SEQ ID NO: 55019 - RNA, 19 nt, Artificial Sequence
  Sense Oligo
acugccuggagguaaguga

SEQ ID NO: 55020 - RNA, 19 nt, Artificial Sequence
  Antisense Oligo
ucacuuaccuccaggcagu

SEQ ID NO: 55021 - RNA, 19 nt, Artificial Sequence
  Sense Oligo
cugccuggagguaagugaa

SEQ ID NO: 55022 - RNA, 19 nt, Artificial Sequence
  Antisense Oligo
uucacuuaccuccaggcag

SEQ ID NO: 55023 - RNA, 19 nt, Artificial Sequence
  Sense Oligo
uucccugaauuucuuuugg

SEQ ID NO: 55024 - RNA, 19 nt, Artificial Sequence
  Antisense Oligo
ccaaaagaaauucagggaa

SEQ ID NO: 55025 - RNA, 19 nt, Artificial Sequence
  Sense Oligo
caguauaauuaacgaaugc

SEQ ID NO: 55026 - RNA, 19 nt, Artificial Sequence
  Antisense Oligo
gcauucguuaauuauacug

SEQ ID NO: 55027 - RNA, 19 nt, Artificial Sequence
  Sense Oligo
guauaauuaacgaaugcuc

SEQ ID NO: 55028 - RNA, 19 nt, Artificial Sequence
  Antisense Oligo
gagcauucguuaauuauac

SEQ ID NO: 55029 - RNA, 19 nt, Artificial Sequence
  Sense Oligo
auaauuaacgaaugcucug

SEQ ID NO: 55030 - RNA, 19 nt, Artificial Sequence
  Antisense Oligo
cagagcauucguuaauuau

SEQ ID NO: 55031 - RNA, 19 nt, Artificial Sequence
  Sense Oligo
uaauuaacgaaugcucugu

SEQ ID NO: 55032 - RNA, 19 nt, Artificial Sequence
  Antisense Oligo
acagagcauucguuaauua

SEQ ID NO: 55033 - RNA, 19 nt, Artificial Sequence
  Sense Oligo
aauuaacgaaugcucuguu

SEQ ID NO: 55034 - RNA, 19 nt, Artificial Sequence
  Antisense Oligo
aacagagcauucguuaauu

SEQ ID NO: 55035 - RNA, 19 nt, Artificial Sequence
  Sense Oligo
auuaacgaaugcucuguuc

SEQ ID NO: 55036 - RNA, 19 nt, Artificial Sequence
  Antisense Oligo
gaacagagcauucguuaau

SEQ ID NO: 55037 - RNA, 19 nt, Artificial Sequence
  Sense Oligo
uuaacgaaugcucuguucc

SEQ ID NO: 55038 - RNA, 19 nt, Artificial Sequence
  Antisense Oligo
ggaacagagcauucguuaa

SEQ ID NO: 55039 - RNA, 19 nt, Artificial Sequence
  Sense Oligo
uaacgaaugcucuguuccg

SEQ ID NO: 55040 - RNA, 19 nt, Artificial Sequence
  Antisense Oligo
cggaacagagcauucguua

SEQ ID NO: 55041 - RNA, 19 nt, Artificial Sequence
  Sense Oligo
aacgaaugcucuguuccgu

SEQ ID NO: 55042 - RNA, 19 nt, Artificial Sequence
  Antisense Oligo
acggaacagagcauucguu

SEQ ID NO: 55043 - RNA, 19 nt, Artificial Sequence
  Sense Oligo
acgaaugcucuguuccgug

SEQ ID NO: 55044 - RNA, 19 nt, Artificial Sequence
  Antisense Oligo
cacggaacagagcauucgu

SEQ ID NO: 55045 - RNA, 19 nt, Artificial Sequence
  Sense Oligo
cgaaugcucuguuccgugc

SEQ ID NO: 55046 - RNA, 19 nt, Artificial Sequence
  Antisense Oligo
gcacggaacagagcauucg

SEQ ID NO: 55047 - RNA, 19 nt, Artificial Sequence
  Sense Oligo
gaaugcucuguuccgugca

SEQ ID NO: 55048 - RNA, 19 nt, Artificial Sequence
  Antisense Oligo
ugcacggaacagagcauuc

SEQ ID NO: 55049 - RNA, 19 nt, Artificial Sequence
  Sense Oligo
aaagguuucaaagacgcgg

SEQ ID NO: 55050 - RNA, 19 nt, Artificial Sequence
  Antisense Oligo
ccgcgucuuugaaaccuuu

SEQ ID NO: 55051 - RNA, 19 nt, Artificial Sequence
  Sense Oligo
uucugccuucagcaacgua

SEQ ID NO: 55052 - RNA, 19 nt, Artificial Sequence
  Antisense Oligo
uacguugcugaaggcagaa

SEQ ID NO: 55053 - RNA, 19 nt, Artificial Sequence
  Sense Oligo
ucugccuucagcaacguau

SEQ ID NO: 55054 - RNA, 19 nt, Artificial Sequence
  Antisense Oligo
auacguugcugaaggcaga

SEQ ID NO: 55055 - RNA, 19 nt, Artificial Sequence
  Sense Oligo
ccuucagcaacguauauuu

SEQ ID NO: 55056 - RNA, 19 nt, Artificial Sequence
  Antisense Oligo
aaauauacguugcugaagg

SEQ ID NO: 55057 - RNA, 19 nt, Artificial Sequence
  Sense Oligo
cuucagcaacguauauuuu

SEQ ID NO: 55058 - RNA, 19 nt, Artificial Sequence
  Antisense Oligo
aaaauauacguugcugaag

SEQ ID NO: 55059 - RNA, 19 nt, Artificial Sequence
  Sense Oligo
uucagcaacguauauuuug

SEQ ID NO: 55060 - RNA, 19 nt, Artificial Sequence
  Antisense Oligo
caaaauauacguugcugaa

SEQ ID NO: 55061 - RNA, 19 nt, Artificial Sequence
  Sense Oligo
ucagcaacguauauuuugg

SEQ ID NO: 55062 - RNA, 19 nt, Artificial Sequence
  Antisense Oligo
ccaaaauauacguugcuga

SEQ ID NO: 55063 - RNA, 19 nt, Artificial Sequence
  Sense Oligo
cagcaacguauauuuuggc

SEQ ID NO: 55064 - RNA, 19 nt, Artificial Sequence
  Antisense Oligo
gccaaaauauacguugcug

SEQ ID NO: 55065 - RNA, 19 nt, Artificial Sequence
  Sense Oligo
agcaacguauauuuuggca

SEQ ID NO: 55066 - RNA, 19 nt, Artificial Sequence
  Antisense Oligo
ugccaaaauauacguugcu

SEQ ID NO: 55067 - RNA, 19 nt, Artificial Sequence
  Sense Oligo
gcaacguauauuuuggcau

SEQ ID NO: 55068 - RNA, 19 nt, Artificial Sequence
  Antisense Oligo
augccaaaauauacguugc

SEQ ID NO: 55069 - RNA, 19 nt, Artificial Sequence
  Sense Oligo
cguauauuuuggcauuuac

SEQ ID NO: 55070 - RNA, 19 nt, Artificial Sequence
  Antisense Oligo
guaaaugccaaaauauacg

SEQ ID NO: 55071 - RNA, 19 nt, Artificial Sequence
  Sense Oligo
uuuggcauuuacuugcaua

SEQ ID NO: 55072 - RNA, 19 nt, Artificial Sequence
  Antisense Oligo
uaugcaaguaaaugccaaa

SEQ ID NO: 55073 - RNA, 19 nt, Artificial Sequence
  Sense Oligo
uuggcauuuacuugcauau

SEQ ID NO: 55074 - RNA, 19 nt, Artificial Sequence
  Antisense Oligo
auaugcaaguaaaugccaa

SEQ ID NO: 55075 - RNA, 19 nt, Artificial Sequence
  Sense Oligo
uggcauuuacuugcauaua

SEQ ID NO: 55076 - RNA, 19 nt, Artificial Sequence
  Antisense Oligo
uauaugcaaguaaaugcca

SEQ ID NO: 55077 - RNA, 19 nt, Artificial Sequence
  Sense Oligo
ggcauuuacuugcauauac

SEQ ID NO: 55078 - RNA, 19 nt, Artificial Sequence
  Antisense Oligo
guauaugcaaguaaaugcc

SEQ ID NO: 55079 - RNA, 19 nt, Artificial Sequence
  Sense Oligo
gaauauacugccaaaguua

SEQ ID NO: 55080 - RNA, 19 nt, Artificial Sequence
  Antisense Oligo
uaacuuuggcaguauauuc

SEQ ID NO: 55081 - RNA, 19 nt, Artificial Sequence
  Sense Oligo
auauacugccaaaguuaac

SEQ ID NO: 55082 - RNA, 19 nt, Artificial Sequence
  Antisense Oligo
guuaacuuuggcaguauau

SEQ ID NO: 55083 - RNA, 19 nt, Artificial Sequence
  Sense Oligo
acagugguuaucauugagu

SEQ ID NO: 55084 - RNA, 19 nt, Artificial Sequence
  Antisense Oligo
acucaaugauaaccacugu

SEQ ID NO: 55085 - RNA, 19 nt, Artificial Sequence
  Sense Oligo
cagugguuaucauugagug

SEQ ID NO: 55086 - RNA, 19 nt, Artificial Sequence
  Antisense Oligo
cacucaaugauaaccacug

SEQ ID NO: 55087 - RNA, 19 nt, Artificial Sequence
  Sense Oligo
agugguuaucauugagugg

SEQ ID NO: 55088 - RNA, 19 nt, Artificial Sequence
  Antisense Oligo
ccacucaaugauaaccacu

SEQ ID NO: 55089 - RNA, 19 nt, Artificial Sequence
  Sense Oligo
gugguuaucauugaguggg

SEQ ID NO: 55090 - RNA, 19 nt, Artificial Sequence
  Antisense Oligo
cccacucaaugauaaccac

SEQ ID NO: 55091 - RNA, 19 nt, Artificial Sequence
  Sense Oligo
gggacauuauggauacuuu

SEQ ID NO: 55092 - RNA, 19 nt, Artificial Sequence
  Antisense Oligo
aaaguauccauaauguccc

SEQ ID NO: 55093 - RNA, 19 nt, Artificial Sequence
  Sense Oligo
ggacauuauggauacuuuu

SEQ ID NO: 55094 - RNA, 19 nt, Artificial Sequence
  Antisense Oligo
aaaaguauccauaaugucc

SEQ ID NO: 55095 - RNA, 19 nt, Artificial Sequence
  Sense Oligo
uuuuccucauagguucacu

SEQ ID NO: 55096 - RNA, 19 nt, Artificial Sequence
  Antisense Oligo
agugaaccuaugaggaaaa

SEQ ID NO: 55097 - RNA, 19 nt, Artificial Sequence
  Sense Oligo
uuuccucauagguucacuu

SEQ ID NO: 55098 - RNA, 19 nt, Artificial Sequence
  Antisense Oligo
aagugaaccuaugaggaaa

SEQ ID NO: 55099 - RNA, 19 nt, Artificial Sequence
  Sense Oligo
cucauagguucacuuuucc

SEQ ID NO: 55100 - RNA, 19 nt, Artificial Sequence
  Antisense Oligo
ggaaaagugaaccuaugag

SEQ ID NO: 55101 - RNA, 19 nt, Artificial Sequence
  Sense Oligo
cccuccuucuuguccuuaa

SEQ ID NO: 55102 - RNA, 19 nt, Artificial Sequence
  Antisense Oligo
uuaaggacaagaaggaggg

SEQ ID NO: 55103 - RNA, 19 nt, Artificial Sequence
  Sense Oligo
ccuccuucuuguccuuaaa

SEQ ID NO: 55104 - RNA, 19 nt, Artificial Sequence
  Antisense Oligo
uuuaaggacaagaaggagg

SEQ ID NO: 55105 - RNA, 19 nt, Artificial Sequence
  Sense Oligo
cuccuucuuguccuuaaaa

SEQ ID NO: 55106 - RNA, 19 nt, Artificial Sequence
  Antisense Oligo
uuuuaaggacaagaaggag

SEQ ID NO: 55107 - RNA, 19 nt, Artificial Sequence
  Sense Oligo
uccuucuuguccuuaaaau

SEQ ID NO: 55108 - RNA, 19 nt, Artificial Sequence
  Antisense Oligo
auuuuaaggacaagaagga

SEQ ID NO: 55109 - RNA, 19 nt, Artificial Sequence
  Sense Oligo
gaauguuagguuuccauaa

SEQ ID NO: 55110 - RNA, 19 nt, Artificial Sequence
  Antisense Oligo
uuauggaaaccuaacauuc

SEQ ID NO: 55111 - RNA, 19 nt, Artificial Sequence
  Sense Oligo
aauguuagguuuccauaag

SEQ ID NO: 55112 - RNA, 19 nt, Artificial Sequence
  Antisense Oligo
cuuauggaaaccuaacauu

SEQ ID NO: 55113 - RNA, 19 nt, Artificial Sequence
  Sense Oligo
auguuagguuuccauaagu

SEQ ID NO: 55114 - RNA, 19 nt, Artificial Sequence
  Antisense Oligo
acuuauggaaaccuaacau

SEQ ID NO: 55115 - RNA, 19 nt, Artificial Sequence
  Sense Oligo
uguuagguuuccauaaguc

SEQ ID NO: 55116 - RNA, 19 nt, Artificial Sequence
  Antisense Oligo
gacuuauggaaaccuaaca

SEQ ID NO: 55117 - RNA, 19 nt, Artificial Sequence
  Sense Oligo
guuagguuuccauaaguca

SEQ ID NO: 55118 - RNA, 19 nt, Artificial Sequence
  Antisense Oligo
ugacuuauggaaaccuaac

SEQ ID NO: 55119 - RNA, 19 nt, Artificial Sequence
  Sense Oligo
uuagguuuccauaagucaa

SEQ ID NO: 55120 - RNA, 19 nt, Artificial Sequence
  Antisense Oligo
uugacuuauggaaaccuaa

SEQ ID NO: 55121 - RNA, 19 nt, Artificial Sequence
  Sense Oligo
uagguuuccauaagucaag

SEQ ID NO: 55122 - RNA, 19 nt, Artificial Sequence
  Antisense Oligo
cuugacuuauggaaaccua

SEQ ID NO: 55123 - RNA, 19 nt, Artificial Sequence
  Sense Oligo
agguuuccauaagucaaga

SEQ ID NO: 55124 - RNA, 19 nt, Artificial Sequence
  Antisense Oligo
ucuugacuuauggaaaccu

SEQ ID NO: 55125 - RNA, 19 nt, Artificial Sequence
  Sense Oligo
gguuuccauaagucaagaa

SEQ ID NO: 55126 - RNA, 19 nt, Artificial Sequence
  Antisense Oligo
uucuugacuuauggaaacc

SEQ ID NO: 55127 - RNA, 19 nt, Artificial Sequence
  Sense Oligo
ucuccacagucacauuggc

SEQ ID NO: 55128 - RNA, 19 nt, Artificial Sequence
  Antisense Oligo
gccaaugugacuguggaga

SEQ ID NO: 55129 - RNA, 19 nt, Artificial Sequence
  Sense Oligo
cuccacagucacauuggcg

SEQ ID NO: 55130 - RNA, 19 nt, Artificial Sequence
  Antisense Oligo
cgccaaugugacuguggag

SEQ ID NO: 55131 - RNA, 19 nt, Artificial Sequence
  Sense Oligo
uccacagucacauuggcga

SEQ ID NO: 55132 - RNA, 19 nt, Artificial Sequence
  Antisense Oligo
ucgccaaugugacugugga

SEQ ID NO: 55133 - RNA, 19 nt, Artificial Sequence
  Sense Oligo
ccacagucacauuggcgac

SEQ ID NO: 55134 - RNA, 19 nt, Artificial Sequence
  Antisense Oligo
gucgccaaugugacugugg

SEQ ID NO: 55135 - RNA, 19 nt, Artificial Sequence
  Sense Oligo
acauuggcgacuguagaag

SEQ ID NO: 55136 - RNA, 19 nt, Artificial Sequence
  Antisense Oligo
cuucuacagucgccaaugu

SEQ ID NO: 55137 - RNA, 19 nt, Artificial Sequence
  Sense Oligo
uggcgacuguagaagcuug

SEQ ID NO: 55138 - RNA, 19 nt, Artificial Sequence
  Antisense Oligo
caagcuucuacagucgcca

SEQ ID NO: 55139 - RNA, 19 nt, Artificial Sequence
  Sense Oligo
ggcgacuguagaagcuugg

SEQ ID NO: 55140 - RNA, 19 nt, Artificial Sequence
  Antisense Oligo
ccaagcuucuacagucgcc

SEQ ID NO: 55141 - RNA, 19 nt, Artificial Sequence
  Sense Oligo
gcgacuguagaagcuuggg

SEQ ID NO: 55142 - RNA, 19 nt, Artificial Sequence
  Antisense Oligo
cccaagcuucuacagucgc

SEQ ID NO: 55143 - RNA, 19 nt, Artificial Sequence
  Sense Oligo
auccuuuucuuucuuguuc

SEQ ID NO: 55144 - RNA, 19 nt, Artificial Sequence
  Antisense Oligo
gaacaagaaagaaaaggau

SEQ ID NO: 55145 - RNA, 19 nt, Artificial Sequence
  Sense Oligo
uccuuuucuuucuuguucc

SEQ ID NO: 55146 - RNA, 19 nt, Artificial Sequence
  Antisense Oligo
ggaacaagaaagaaaagga

SEQ ID NO: 55147 - RNA, 19 nt, Artificial Sequence
  Sense Oligo
ccuuuucuuucuuguuccu

SEQ ID NO: 55148 - RNA, 19 nt, Artificial Sequence
  Antisense Oligo
aggaacaagaaagaaaagg

SEQ ID NO: 55149 - RNA, 19 nt, Artificial Sequence
  Sense Oligo
uuucuuucuuguuccuugu

SEQ ID NO: 55150 - RNA, 19 nt, Artificial Sequence
  Antisense Oligo
acaaggaacaagaaagaaa

SEQ ID NO: 55151 - RNA, 19 nt, Artificial Sequence
  Sense Oligo
cuuguuccucaggauucaa

SEQ ID NO: 55152 - RNA, 19 nt, Artificial Sequence
  Antisense Oligo
uugaauccugaggaacaag

SEQ ID NO: 55153 - RNA, 19 nt, Artificial Sequence
  Sense Oligo
uuguuccucaggauucaau

SEQ ID NO: 55154 - RNA, 19 nt, Artificial Sequence
  Antisense Oligo
auugaauccugaggaacaa

SEQ ID NO: 55155 - RNA, 19 nt, Artificial Sequence
  Sense Oligo
uguuccucaggauucaaua

SEQ ID NO: 55156 - RNA, 19 nt, Artificial Sequence
  Antisense Oligo
uauugaauccugaggaaca

SEQ ID NO: 55157 - RNA, 19 nt, Artificial Sequence
  Sense Oligo
guuccucaggauucaauac

SEQ ID NO: 55158 - RNA, 19 nt, Artificial Sequence
  Antisense Oligo
guauugaauccugaggaac

SEQ ID NO: 55159 - RNA, 19 nt, Artificial Sequence
  Sense Oligo
uuccucaggauucaauacu

SEQ ID NO: 55160 - RNA, 19 nt, Artificial Sequence
  Antisense Oligo
aguauugaauccugaggaa

SEQ ID NO: 55161 - RNA, 19 nt, Artificial Sequence
  Sense Oligo
uccucaggauucaauacuu

SEQ ID NO: 55162 - RNA, 19 nt, Artificial Sequence
  Antisense Oligo
aaguauugaauccugagga

SEQ ID NO: 55163 - RNA, 19 nt, Artificial Sequence
  Sense Oligo
ccucaggauucaauacuug

SEQ ID NO: 55164 - RNA, 19 nt, Artificial Sequence
  Antisense Oligo
caaguauugaauccugagg

SEQ ID NO: 55165 - RNA, 19 nt, Artificial Sequence
  Sense Oligo
agaagaccagugcuuacuc

SEQ ID NO: 55166 - RNA, 19 nt, Artificial Sequence
  Antisense Oligo
gaguaagcacuggucuucu

SEQ ID NO: 55167 - RNA, 19 nt, Artificial Sequence
  Sense Oligo
gaagaccagugcuuacucc

SEQ ID NO: 55168 - RNA, 19 nt, Artificial Sequence
  Antisense Oligo
ggaguaagcacuggucuuc

SEQ ID NO: 55169 - RNA, 19 nt, Artificial Sequence
  Sense Oligo
accagugcuuacuccagaa

SEQ ID NO: 55170 - RNA, 19 nt, Artificial Sequence
  Antisense Oligo
uucuggaguaagcacuggu

SEQ ID NO: 55171 - RNA, 19 nt, Artificial Sequence
  Sense Oligo
ccuagaagaggaaggucgu

SEQ ID NO: 55172 - RNA, 19 nt, Artificial Sequence
  Antisense Oligo
acgaccuuccucuucuagg

SEQ ID NO: 55173 - RNA, 19 nt, Artificial Sequence
  Sense Oligo
cuagaagaggaaggucguu

SEQ ID NO: 55174 - RNA, 19 nt, Artificial Sequence
  Antisense Oligo
aacgaccuuccucuucuag

SEQ ID NO: 55175 - RNA, 19 nt, Artificial Sequence
  Sense Oligo
uagaagaggaaggucguuu

SEQ ID NO: 55176 - RNA, 19 nt, Artificial Sequence
  Antisense Oligo
aaacgaccuuccucuucua

SEQ ID NO: 55177 - RNA, 19 nt, Artificial Sequence
  Sense Oligo
agaagaggaaggucguuuc

SEQ ID NO: 55178 - RNA, 19 nt, Artificial Sequence
  Antisense Oligo
gaaacgaccuuccucuucu

SEQ ID NO: 55179 - RNA, 19 nt, Artificial Sequence
  Sense Oligo
aggucguuuccuuaaggca

SEQ ID NO: 55180 - RNA, 19 nt, Artificial Sequence
  Antisense Oligo
ugccuuaaggaaacgaccu

SEQ ID NO: 55181 - RNA, 19 nt, Artificial Sequence
  Sense Oligo
guuuccuuaaggcauauuc

SEQ ID NO: 55182 - RNA, 19 nt, Artificial Sequence
  Antisense Oligo
gaauaugccuuaaggaaac

SEQ ID NO: 55183 - RNA, 19 nt, Artificial Sequence
  Sense Oligo
uccuuaaggcauauucucc

SEQ ID NO: 55184 - RNA, 19 nt, Artificial Sequence
  Antisense Oligo
ggagaauaugccuuaagga

SEQ ID NO: 55185 - RNA, 19 nt, Artificial Sequence
  Sense Oligo
ccuuaaggcauauucucca

SEQ ID NO: 55186 - RNA, 19 nt, Artificial Sequence
  Antisense Oligo
uggagaauaugccuuaagg

SEQ ID NO: 55187 - RNA, 19 nt, Artificial Sequence
  Sense Oligo
cuuaaggcauauucuccag

SEQ ID NO: 55188 - RNA, 19 nt, Artificial Sequence
  Antisense Oligo
cuggagaauaugccuuaag

SEQ ID NO: 55189 - RNA, 19 nt, Artificial Sequence
  Sense Oligo
uuaaggcauauucuccagc

SEQ ID NO: 55190 - RNA, 19 nt, Artificial Sequence
  Antisense Oligo
gcuggagaauaugccuuaa

SEQ ID NO: 55191 - RNA, 19 nt, Artificial Sequence
  Sense Oligo
uaaggcauauucuccagca

SEQ ID NO: 55192 - RNA, 19 nt, Artificial Sequence
  Antisense Oligo
ugcuggagaauaugccuua

SEQ ID NO: 55193 - RNA, 19 nt, Artificial Sequence
  Sense Oligo
aaggcauauucuccagcaa

SEQ ID NO: 55194 - RNA, 19 nt, Artificial Sequence
  Antisense Oligo
uugcuggagaauaugccuu

SEQ ID NO: 55195 - RNA, 19 nt, Artificial Sequence
  Sense Oligo
aggcauauucuccagcaag

SEQ ID NO: 55196 - RNA, 19 nt, Artificial Sequence
  Antisense Oligo
cuugcuggagaauaugccu

SEQ ID NO: 55197 - RNA, 19 nt, Artificial Sequence
  Sense Oligo
ggcauauucuccagcaagc

SEQ ID NO: 55198 - RNA, 19 nt, Artificial Sequence
  Antisense Oligo
gcuugcuggagaauaugcc

SEQ ID NO: 55199 - RNA, 19 nt, Artificial Sequence
  Sense Oligo
gcauauucuccagcaagcc

SEQ ID NO: 55200 - RNA, 19 nt, Artificial Sequence
  Antisense Oligo
ggcuugcuggagaauaugc

SEQ ID NO: 55201 - RNA, 19 nt, Artificial Sequence
  Sense Oligo
cauauucuccagcaagccg

SEQ ID NO: 55202 - RNA, 19 nt, Artificial Sequence
  Antisense Oligo
cggcuugcuggagaauaug

SEQ ID NO: 55203 - RNA, 19 nt, Artificial Sequence
  Sense Oligo
auauucuccagcaagccgg

SEQ ID NO: 55204 - RNA, 19 nt, Artificial Sequence
  Antisense Oligo
ccggcuugcuggagaauau

SEQ ID NO: 55205 - RNA, 19 nt, Artificial Sequence
  Sense Oligo
ugccaacgaggccucgguu

SEQ ID NO: 55206 - RNA, 19 nt, Artificial Sequence
  Antisense Oligo
aaccgaggccucguuggca

SEQ ID NO: 55207 - RNA, 19 nt, Artificial Sequence
  Sense Oligo
aacgaggccucgguugaau

SEQ ID NO: 55208 - RNA, 19 nt, Artificial Sequence
  Antisense Oligo
auucaaccgaggccucguu

SEQ ID NO: 55209 - RNA, 19 nt, Artificial Sequence
  Sense Oligo
acgaggccucgguugaaua

SEQ ID NO: 55210 - RNA, 19 nt, Artificial Sequence
  Antisense Oligo
uauucaaccgaggccucgu

SEQ ID NO: 55211 - RNA, 19 nt, Artificial Sequence
  Sense Oligo
cgaggccucgguugaauac

SEQ ID NO: 55212 - RNA, 19 nt, Artificial Sequence
  Antisense Oligo
guauucaaccgaggccucg

SEQ ID NO: 55213 - RNA, 19 nt, Artificial Sequence
  Sense Oligo
gaggccucgguugaauacc

SEQ ID NO: 55214 - RNA, 19 nt, Artificial Sequence
  Antisense Oligo
gguauucaaccgaggccuc

SEQ ID NO: 55215 - RNA, 19 nt, Artificial Sequence
  Sense Oligo
aggccucgguugaauaccu

SEQ ID NO: 55216 - RNA, 19 nt, Artificial Sequence
  Antisense Oligo
agguauucaaccgaggccu

SEQ ID NO: 55217 - RNA, 19 nt, Artificial Sequence
  Sense Oligo
ggccucgguugaauaccug

SEQ ID NO: 55218 - RNA, 19 nt, Artificial Sequence
  Antisense Oligo
cagguauucaaccgaggcc

SEQ ID NO: 55219 - RNA, 19 nt, Artificial Sequence
  Sense Oligo
gccucgguugaauaccugc

SEQ ID NO: 55220 - RNA, 19 nt, Artificial Sequence
  Antisense Oligo
gcagguauucaaccgaggc

SEQ ID NO: 55221 - RNA, 19 nt, Artificial Sequence
  Sense Oligo
ccucgguugaauaccugca

SEQ ID NO: 55222 - RNA, 19 nt, Artificial Sequence
  Antisense Oligo
ugcagguauucaaccgagg

SEQ ID NO: 55223 - RNA, 19 nt, Artificial Sequence
  Sense Oligo
cucgguugaauaccugcaa

SEQ ID NO: 55224 - RNA, 19 nt, Artificial Sequence
  Antisense Oligo
uugcagguauucaaccgag

SEQ ID NO: 55225 - RNA, 19 nt, Artificial Sequence
  Sense Oligo
ucgguugaauaccugcaag

SEQ ID NO: 55226 - RNA, 19 nt, Artificial Sequence
  Antisense Oligo
cuugcagguauucaaccga

SEQ ID NO: 55227 - RNA, 19 nt, Artificial Sequence
  Sense Oligo
cgguugaauaccugcaaga

SEQ ID NO: 55228 - RNA, 19 nt, Artificial Sequence
  Antisense Oligo
ucuugcagguauucaaccg

SEQ ID NO: 55229 - RNA, 19 nt, Artificial Sequence
  Sense Oligo
gguugaauaccugcaagag

SEQ ID NO: 55230 - RNA, 19 nt, Artificial Sequence
  Antisense Oligo
cucuugcagguauucaacc

SEQ ID NO: 55231 - RNA, 19 nt, Artificial Sequence
  Sense Oligo
guugaauaccugcaagagg

SEQ ID NO: 55232 - RNA, 19 nt, Artificial Sequence
  Antisense Oligo
ccucuugcagguauucaac

SEQ ID NO: 55233 - RNA, 19 nt, Artificial Sequence
  Sense Oligo
auccgccucugccucgaca

SEQ ID NO: 55234 - RNA, 19 nt, Artificial Sequence
  Antisense Oligo
ugucgaggcagaggcggau

SEQ ID NO: 55235 - RNA, 19 nt, Artificial Sequence
  Sense Oligo
cugccucgacagagcugca

SEQ ID NO: 55236 - RNA, 19 nt, Artificial Sequence
  Antisense Oligo
ugcagcucugucgaggcag

SEQ ID NO: 55237 - RNA, 19 nt, Artificial Sequence
  Sense Oligo
cucgacagagcugcagauu

SEQ ID NO: 55238 - RNA, 19 nt, Artificial Sequence
  Antisense Oligo
aaucugcagcucugucgag

SEQ ID NO: 55239 - RNA, 19 nt, Artificial Sequence
  Sense Oligo
ucgacagagcugcagauuu

SEQ ID NO: 55240 - RNA, 19 nt, Artificial Sequence
  Antisense Oligo
aaaucugcagcucugucga

SEQ ID NO: 55241 - RNA, 19 nt, Artificial Sequence
  Sense Oligo
cgacagagcugcagauuuc

SEQ ID NO: 55242 - RNA, 19 nt, Artificial Sequence
  Antisense Oligo
gaaaucugcagcucugucg

SEQ ID NO: 55243 - RNA, 19 nt, Artificial Sequence
  Sense Oligo
gacagagcugcagauuucc

SEQ ID NO: 55244 - RNA, 19 nt, Artificial Sequence
  Antisense Oligo
ggaaaucugcagcucuguc

SEQ ID NO: 55245 - RNA, 19 nt, Artificial Sequence
  Sense Oligo
gagcugcagauuuccucuc

SEQ ID NO: 55246 - RNA, 19 nt, Artificial Sequence
  Antisense Oligo
gagaggaaaucugcagcuc

SEQ ID NO: 55247 - RNA, 19 nt, Artificial Sequence
  Sense Oligo
agcugcagauuuccucucg

SEQ ID NO: 55248 - RNA, 19 nt, Artificial Sequence
  Antisense Oligo
cgagaggaaaucugcagcu

SEQ ID NO: 55249 - RNA, 19 nt, Artificial Sequence
  Sense Oligo
gcugcagauuuccucucgg

SEQ ID NO: 55250 - RNA, 19 nt, Artificial Sequence
  Antisense Oligo
ccgagaggaaaucugcagc

SEQ ID NO: 55251 - RNA, 19 nt, Artificial Sequence
  Sense Oligo
cugcagauuuccucucgga

SEQ ID NO: 55252 - RNA, 19 nt, Artificial Sequence
  Antisense Oligo
uccgagaggaaaucugcag

SEQ ID NO: 55253 - RNA, 19 nt, Artificial Sequence
  Sense Oligo
ugcagauuuccucucggag

SEQ ID NO: 55254 - RNA, 19 nt, Artificial Sequence
  Antisense Oligo
cuccgagaggaaaucugca

SEQ ID NO: 55255 - RNA, 19 nt, Artificial Sequence
  Sense Oligo
gcagauuuccucucggagc

SEQ ID NO: 55256 - RNA, 19 nt, Artificial Sequence
  Antisense Oligo
gcuccgagaggaaaucugc

SEQ ID NO: 55257 - RNA, 19 nt, Artificial Sequence
  Sense Oligo
cagauuuccucucggagcc

SEQ ID NO: 55258 - RNA, 19 nt, Artificial Sequence
  Antisense Oligo
ggcuccgagaggaaaucug

SEQ ID NO: 55259 - RNA, 19 nt, Artificial Sequence
  Sense Oligo
agauuuccucucggagccu

SEQ ID NO: 55260 - RNA, 19 nt, Artificial Sequence
  Antisense Oligo
aggcuccgagaggaaaucu

SEQ ID NO: 55261 - RNA, 19 nt, Artificial Sequence
  Sense Oligo
ccuugcuuuccuuuggguu

SEQ ID NO: 55262 - RNA, 19 nt, Artificial Sequence
  Antisense Oligo
aacccaaaggaaagcaagg

SEQ ID NO: 55263 - RNA, 19 nt, Artificial Sequence
  Sense Oligo
cuugcuuuccuuuggguuu

SEQ ID NO: 55264 - RNA, 19 nt, Artificial Sequence
  Antisense Oligo
aaacccaaaggaaagcaag

SEQ ID NO: 55265 - RNA, 19 nt, Artificial Sequence
  Sense Oligo
gcuuuccuuuggguuuaaa

SEQ ID NO: 55266 - RNA, 19 nt, Artificial Sequence
  Antisense Oligo
uuuaaacccaaaggaaagc

SEQ ID NO: 55267 - RNA, 19 nt, Artificial Sequence
  Sense Oligo
uuggguuuaaagacuccgu

SEQ ID NO: 55268 - RNA, 19 nt, Artificial Sequence
  Antisense Oligo
acggagucuuuaaacccaa

SEQ ID NO: 55269 - RNA, 19 nt, Artificial Sequence
  Sense Oligo
guuuaaagacuccguuauu

SEQ ID NO: 55270 - RNA, 19 nt, Artificial Sequence
  Antisense Oligo
aauaacggagucuuuaaac

SEQ ID NO: 55271 - RNA, 19 nt, Artificial Sequence
  Sense Oligo
aaagacuccguuauuuaga

SEQ ID NO: 55272 - RNA, 19 nt, Artificial Sequence
  Antisense Oligo
ucuaaauaacggagucuuu

SEQ ID NO: 55273 - RNA, 19 nt, Artificial Sequence
  Sense Oligo
aagacuccguuauuuagaa

SEQ ID NO: 55274 - RNA, 19 nt, Artificial Sequence
  Antisense Oligo
uucuaaauaacggagucuu

SEQ ID NO: 55275 - RNA, 19 nt, Artificial Sequence
  Sense Oligo
aaauucaggaaguauggga

SEQ ID NO: 55276 - RNA, 19 nt, Artificial Sequence
  Antisense Oligo
ucccauacuuccugaauuu

SEQ ID NO: 55277 - RNA, 19 nt, Artificial Sequence
  Sense Oligo
aauucaggaaguaugggaa

SEQ ID NO: 55278 - RNA, 19 nt, Artificial Sequence
  Antisense Oligo
uucccauacuuccugaauu

SEQ ID NO: 55279 - RNA, 19 nt, Artificial Sequence
  Sense Oligo
cuaguucuucgaauagacu

SEQ ID NO: 55280 - RNA, 19 nt, Artificial Sequence
  Antisense Oligo
agucuauucgaagaacuag

SEQ ID NO: 55281 - RNA, 19 nt, Artificial Sequence
  Sense Oligo
aguucuucgaauagacuac

SEQ ID NO: 55282 - RNA, 19 nt, Artificial Sequence
  Antisense Oligo
guagucuauucgaagaacu

SEQ ID NO: 55283 - RNA, 19 nt, Artificial Sequence
  Sense Oligo
uucuucgaauagacuacua

SEQ ID NO: 55284 - RNA, 19 nt, Artificial Sequence
  Antisense Oligo
uaguagucuauucgaagaa

SEQ ID NO: 55285 - RNA, 19 nt, Artificial Sequence
  Sense Oligo
ucuucgaauagacuacuac

SEQ ID NO: 55286 - RNA, 19 nt, Artificial Sequence
  Antisense Oligo
guaguagucuauucgaaga

SEQ ID NO: 55287 - RNA, 19 nt, Artificial Sequence
  Sense Oligo
cuucgaauagacuacuacu

SEQ ID NO: 55288 - RNA, 19 nt, Artificial Sequence
  Antisense Oligo
aguaguagucuauucgaag

SEQ ID NO: 55289 - RNA, 19 nt, Artificial Sequence
  Sense Oligo
gaauagacuacuacugggc

SEQ ID NO: 55290 - RNA, 19 nt, Artificial Sequence
  Antisense Oligo
gcccaguaguagucuauuc

SEQ ID NO: 55291 - RNA, 19 nt, Artificial Sequence
  Sense Oligo
aauagacuacuacugggcu

SEQ ID NO: 55292 - RNA, 19 nt, Artificial Sequence
  Antisense Oligo
agcccaguaguagucuauu

SEQ ID NO: 55293 - RNA, 19 nt, Artificial Sequence
  Sense Oligo
auagacuacuacugggcuu

SEQ ID NO: 55294 - RNA, 19 nt, Artificial Sequence
  Antisense Oligo
aagcccaguaguagucuau

SEQ ID NO: 55295 - RNA, 19 nt, Artificial Sequence
  Sense Oligo
uagacuacuacugggcuuu

SEQ ID NO: 55296 - RNA, 19 nt, Artificial Sequence
  Antisense Oligo
aaagcccaguaguagucua

SEQ ID NO: 55297 - RNA, 19 nt, Artificial Sequence
  Sense Oligo
agacuacuacugggcuuuu

SEQ ID NO: 55298 - RNA, 19 nt, Artificial Sequence
  Antisense Oligo
aaaagcccaguaguagucu

SEQ ID NO: 55299 - RNA, 19 nt, Artificial Sequence
  Sense Oligo
gacuacuacugggcuuuuc

SEQ ID NO: 55300 - RNA, 19 nt, Artificial Sequence
  Antisense Oligo
gaaaagcccaguaguaguc

SEQ ID NO: 55301 - RNA, 19 nt, Artificial Sequence
  Sense Oligo
acuacuacugggcuuuucu

SEQ ID NO: 55302 - RNA, 19 nt, Artificial Sequence
  Antisense Oligo
agaaaagcccaguaguagu

SEQ ID NO: 55303 - RNA, 19 nt, Artificial Sequence
  Sense Oligo
cuacuacugggcuuuucua

SEQ ID NO: 55304 - RNA, 19 nt, Artificial Sequence
  Antisense Oligo
uagaaaagcccaguaguag

SEQ ID NO: 55305 - RNA, 19 nt, Artificial Sequence
  Sense Oligo
uacuacugggcuuuucuac

SEQ ID NO: 55306 - RNA, 19 nt, Artificial Sequence
  Antisense Oligo
guagaaaagcccaguagua

SEQ ID NO: 55307 - RNA, 19 nt, Artificial Sequence
  Sense Oligo
acuacugggcuuuucuaca

SEQ ID NO: 55308 - RNA, 19 nt, Artificial Sequence
  Antisense Oligo
uguagaaaagcccaguagu

SEQ ID NO: 55309 - RNA, 19 nt, Artificial Sequence
  Sense Oligo
cugggcuuuucuacauccc

SEQ ID NO: 55310 - RNA, 19 nt, Artificial Sequence
  Antisense Oligo
gggauguagaaaagcccag

SEQ ID NO: 55311 - RNA, 19 nt, Artificial Sequence
  Sense Oligo
ggauguguuucugugaaug

SEQ ID NO: 55312 - RNA, 19 nt, Artificial Sequence
  Antisense Oligo
cauucacagaaacacaucc

SEQ ID NO: 55313 - RNA, 19 nt, Artificial Sequence
  Sense Oligo
gauguguuucugugaaugc

SEQ ID NO: 55314 - RNA, 19 nt, Artificial Sequence
  Antisense Oligo
gcauucacagaaacacauc

SEQ ID NO: 55315 - RNA, 19 nt, Artificial Sequence
  Sense Oligo
auguguuucugugaaugcc

SEQ ID NO: 55316 - RNA, 19 nt, Artificial Sequence
  Antisense Oligo
ggcauucacagaaacacau

SEQ ID NO: 55317 - RNA, 19 nt, Artificial Sequence
  Sense Oligo
uguguuucugugaaugccu

SEQ ID NO: 55318 - RNA, 19 nt, Artificial Sequence
  Antisense Oligo
aggcauucacagaaacaca

SEQ ID NO: 55319 - RNA, 19 nt, Artificial Sequence
  Sense Oligo
guguuucugugaaugccug

SEQ ID NO: 55320 - RNA, 19 nt, Artificial Sequence
  Antisense Oligo
caggcauucacagaaacac

SEQ ID NO: 55321 - RNA, 19 nt, Artificial Sequence
  Sense Oligo
uguuucugugaaugccugu

SEQ ID NO: 55322 - RNA, 19 nt, Artificial Sequence
  Antisense Oligo
acaggcauucacagaaaca

SEQ ID NO: 55323 - RNA, 19 nt, Artificial Sequence
  Sense Oligo
guuucugugaaugccugug

SEQ ID NO: 55324 - RNA, 19 nt, Artificial Sequence
  Antisense Oligo
cacaggcauucacagaaac

SEQ ID NO: 55325 - RNA, 19 nt, Artificial Sequence
  Sense Oligo
uucugugaaugccuguggg

SEQ ID NO: 55326 - RNA, 19 nt, Artificial Sequence
  Antisense Oligo
cccacaggcauucacagaa

SEQ ID NO: 55327 - RNA, 19 nt, Artificial Sequence
  Sense Oligo
ucugugaaugccugugggu

SEQ ID NO: 55328 - RNA, 19 nt, Artificial Sequence
  Antisense Oligo
acccacaggcauucacaga

SEQ ID NO: 55329 - RNA, 19 nt, Artificial Sequence
  Sense Oligo
ugugaaugccuguggguag

SEQ ID NO: 55330 - RNA, 19 nt, Artificial Sequence
  Antisense Oligo
cuacccacaggcauucaca

SEQ ID NO: 55331 - RNA, 19 nt, Artificial Sequence
  Sense Oligo
gugaaugccuguggguagg

SEQ ID NO: 55332 - RNA, 19 nt, Artificial Sequence
  Antisense Oligo
ccuacccacaggcauucac

SEQ ID NO: 55333 - RNA, 19 nt, Artificial Sequence
  Sense Oligo
ugaaugccuguggguaggu

SEQ ID NO: 55334 - RNA, 19 nt, Artificial Sequence
  Antisense Oligo
accuacccacaggcauuca

SEQ ID NO: 55335 - RNA, 19 nt, Artificial Sequence
  Sense Oligo
gaaugccuguggguagguc

SEQ ID NO: 55336 - RNA, 19 nt, Artificial Sequence
  Antisense Oligo
gaccuacccacaggcauuc

SEQ ID NO: 55337 - RNA, 19 nt, Artificial Sequence
  Sense Oligo
gaugcccucugguuggccu

SEQ ID NO: 55338 - RNA, 19 nt, Artificial Sequence
  Antisense Oligo
aggccaaccagagggcauc

SEQ ID NO: 55339 - RNA, 19 nt, Artificial Sequence
  Sense Oligo
augcccucugguuggccuu

SEQ ID NO: 55340 - RNA, 19 nt, Artificial Sequence
  Antisense Oligo
aaggccaaccagagggcau

SEQ ID NO: 55341 - RNA, 19 nt, Artificial Sequence
  Sense Oligo
ugcccucugguuggccuug

SEQ ID NO: 55342 - RNA, 19 nt, Artificial Sequence
  Antisense Oligo
caaggccaaccagagggca

SEQ ID NO: 55343 - RNA, 19 nt, Artificial Sequence
  Sense Oligo
gcccucugguuggccuugu

SEQ ID NO: 55344 - RNA, 19 nt, Artificial Sequence
  Antisense Oligo
acaaggccaaccagagggc

SEQ ID NO: 55345 - RNA, 19 nt, Artificial Sequence
  Sense Oligo
cccucugguuggccuugug

SEQ ID NO: 55346 - RNA, 19 nt, Artificial Sequence
  Antisense Oligo
cacaaggccaaccagaggg

SEQ ID NO: 55347 - RNA, 19 nt, Artificial Sequence
  Sense Oligo
ccucugguuggccuugugu

SEQ ID NO: 55348 - RNA, 19 nt, Artificial Sequence
  Antisense Oligo
acacaaggccaaccagagg

SEQ ID NO: 55349 - RNA, 19 nt, Artificial Sequence
  Sense Oligo
cucugguuggccuuguguc

SEQ ID NO: 55350 - RNA, 19 nt, Artificial Sequence
  Antisense Oligo
gacacaaggccaaccagag

SEQ ID NO: 55351 - RNA, 19 nt, Artificial Sequence
  Sense Oligo
ucugguuggccuugugucc

SEQ ID NO: 55352 - RNA, 19 nt, Artificial Sequence
  Antisense Oligo
ggacacaaggccaaccaga

SEQ ID NO: 55353 - RNA, 19 nt, Artificial Sequence
  Sense Oligo
cugguuggccuuguguccu

SEQ ID NO: 55354 - RNA, 19 nt, Artificial Sequence
  Antisense Oligo
aggacacaaggccaaccag

SEQ ID NO: 55355 - RNA, 19 nt, Artificial Sequence
  Sense Oligo
ugguuggccuuguguccua

SEQ ID NO: 55356 - RNA, 19 nt, Artificial Sequence
  Antisense Oligo
uaggacacaaggccaacca

SEQ ID NO: 55357 - RNA, 19 nt, Artificial Sequence
  Sense Oligo
gguuggccuuguguccuac

SEQ ID NO: 55358 - RNA, 19 nt, Artificial Sequence
  Antisense Oligo
guaggacacaaggccaacc

SEQ ID NO: 55359 - RNA, 19 nt, Artificial Sequence
  Sense Oligo
ccuaagucaccagccacuc

SEQ ID NO: 55360 - RNA, 19 nt, Artificial Sequence
  Antisense Oligo
gaguggcuggugacuuagg

SEQ ID NO: 55361 - RNA, 19 nt, Artificial Sequence
  Sense Oligo
agucaccagccacucaccc

SEQ ID NO: 55362 - RNA, 19 nt, Artificial Sequence
  Antisense Oligo
gggugaguggcuggugacu

SEQ ID NO: 55363 - RNA, 19 nt, Artificial Sequence
  Sense Oligo
accagccacucacccgcuu

SEQ ID NO: 55364 - RNA, 19 nt, Artificial Sequence
  Antisense Oligo
aagcgggugaguggcuggu

SEQ ID NO: 55365 - RNA, 19 nt, Artificial Sequence
  Sense Oligo
ccagccacucacccgcuuu

SEQ ID NO: 55366 - RNA, 19 nt, Artificial Sequence
  Antisense Oligo
aaagcgggugaguggcugg

SEQ ID NO: 55367 - RNA, 19 nt, Artificial Sequence
  Sense Oligo
cagccacucacccgcuuuc

SEQ ID NO: 55368 - RNA, 19 nt, Artificial Sequence
  Antisense Oligo
gaaagcgggugaguggcug

SEQ ID NO: 55369 - RNA, 19 nt, Artificial Sequence
  Sense Oligo
agccacucacccgcuuucu

SEQ ID NO: 55370 - RNA, 19 nt, Artificial Sequence
  Antisense Oligo
agaaagcgggugaguggcu

SEQ ID NO: 55371 - RNA, 19 nt, Artificial Sequence
  Sense Oligo
acucacccgcuuucucguu

SEQ ID NO: 55372 - RNA, 19 nt, Artificial Sequence
  Antisense Oligo
aacgagaaagcgggugagu

SEQ ID NO: 55373 - RNA, 19 nt, Artificial Sequence
  Sense Oligo
cucacccgcuuucucguug

SEQ ID NO: 55374 - RNA, 19 nt, Artificial Sequence
  Antisense Oligo
caacgagaaagcgggugag

SEQ ID NO: 55375 - RNA, 19 nt, Artificial Sequence
  Sense Oligo
ucacccgcuuucucguugg

SEQ ID NO: 55376 - RNA, 19 nt, Artificial Sequence
  Antisense Oligo
ccaacgagaaagcggguga

SEQ ID NO: 55377 - RNA, 19 nt, Artificial Sequence
  Sense Oligo
cacccgcuuucucguuggc

SEQ ID NO: 55378 - RNA, 19 nt, Artificial Sequence
  Antisense Oligo
gccaacgagaaagcgggug

SEQ ID NO: 55379 - RNA, 19 nt, Artificial Sequence
  Sense Oligo
acccgcuuucucguuggcc

SEQ ID NO: 55380 - RNA, 19 nt, Artificial Sequence
  Antisense Oligo
ggccaacgagaaagcgggu

SEQ ID NO: 55381 - RNA, 19 nt, Artificial Sequence
  Sense Oligo
cccgcuuucucguuggccu

SEQ ID NO: 55382 - RNA, 19 nt, Artificial Sequence
  Antisense Oligo
aggccaacgagaaagcggg

SEQ ID NO: 55383 - RNA, 19 nt, Artificial Sequence
  Sense Oligo
ccgcuuucucguuggccuc

SEQ ID NO: 55384 - RNA, 19 nt, Artificial Sequence
  Antisense Oligo
gaggccaacgagaaagcgg

SEQ ID NO: 55385 - RNA, 19 nt, Artificial Sequence
  Sense Oligo
cgcuuucucguuggccucu

SEQ ID NO: 55386 - RNA, 19 nt, Artificial Sequence
  Antisense Oligo
agaggccaacgagaaagcg

SEQ ID NO: 55387 - RNA, 19 nt, Artificial Sequence
  Sense Oligo
gcuuucucguuggccucuc

SEQ ID NO: 55388 - RNA, 19 nt, Artificial Sequence
  Antisense Oligo
gagaggccaacgagaaagc

SEQ ID NO: 55389 - RNA, 19 nt, Artificial Sequence
  Sense Oligo
cuuucucguuggccucuca

SEQ ID NO: 55390 - RNA, 19 nt, Artificial Sequence
  Antisense Oligo
ugagaggccaacgagaaag

SEQ ID NO: 55391 - RNA, 19 nt, Artificial Sequence
  Sense Oligo
uuucucguuggccucucag

SEQ ID NO: 55392 - RNA, 19 nt, Artificial Sequence
  Antisense Oligo
cugagaggccaacgagaaa

SEQ ID NO: 55393 - RNA, 19 nt, Artificial Sequence
  Sense Oligo
uucucguuggccucucaga

SEQ ID NO: 55394 - RNA, 19 nt, Artificial Sequence
  Antisense Oligo
ucugagaggccaacgagaa

SEQ ID NO: 55395 - RNA, 19 nt, Artificial Sequence
  Sense Oligo
gcuaccugcagcaagucaa

SEQ ID NO: 55396 - RNA, 19 nt, Artificial Sequence
  Antisense Oligo
uugacuugcugcagguagc

SEQ ID NO: 55397 - RNA, 19 nt, Artificial Sequence
  Sense Oligo
cuaccugcagcaagucaag

SEQ ID NO: 55398 - RNA, 19 nt, Artificial Sequence
  Antisense Oligo
cuugacuugcugcagguag

SEQ ID NO: 55399 - RNA, 19 nt, Artificial Sequence
  Sense Oligo
uaccugcagcaagucaagc

SEQ ID NO: 55400 - RNA, 19 nt, Artificial Sequence
  Antisense Oligo
gcuugacuugcugcaggua

SEQ ID NO: 55401 - RNA, 19 nt, Artificial Sequence
  Sense Oligo
accugcagcaagucaagca

SEQ ID NO: 55402 - RNA, 19 nt, Artificial Sequence
  Antisense Oligo
ugcuugacuugcugcaggu

SEQ ID NO: 55403 - RNA, 19 nt, Artificial Sequence
  Sense Oligo
ugcagcaagucaagcaguu

SEQ ID NO: 55404 - RNA, 19 nt, Artificial Sequence
  Antisense Oligo
aacugcuugacuugcugca

SEQ ID NO: 55405 - RNA, 19 nt, Artificial Sequence
  Sense Oligo
gcagcaagucaagcaguuc

SEQ ID NO: 55406 - RNA, 19 nt, Artificial Sequence
  Antisense Oligo
gaacugcuugacuugcugc

SEQ ID NO: 55407 - RNA, 19 nt, Artificial Sequence
  Sense Oligo
cagcaagucaagcaguucu

SEQ ID NO: 55408 - RNA, 19 nt, Artificial Sequence
  Antisense Oligo
agaacugcuugacuugcug

SEQ ID NO: 55409 - RNA, 19 nt, Artificial Sequence
  Sense Oligo
agcaagucaagcaguucug

SEQ ID NO: 55410 - RNA, 19 nt, Artificial Sequence
  Antisense Oligo
cagaacugcuugacuugcu

SEQ ID NO: 55411 - RNA, 19 nt, Artificial Sequence
  Sense Oligo
gcaagucaagcaguucugu

SEQ ID NO: 55412 - RNA, 19 nt, Artificial Sequence
  Antisense Oligo
acagaacugcuugacuugc

SEQ ID NO: 55413 - RNA, 19 nt, Artificial Sequence
  Sense Oligo
caagucaagcaguucugua

SEQ ID NO: 55414 - RNA, 19 nt, Artificial Sequence
  Antisense Oligo
uacagaacugcuugacuug

SEQ ID NO: 55415 - RNA, 19 nt, Artificial Sequence
  Sense Oligo
aagucaagcaguucuguau

SEQ ID NO: 55416 - RNA, 19 nt, Artificial Sequence
  Antisense Oligo
auacagaacugcuugacuu

SEQ ID NO: 55417 - RNA, 19 nt, Artificial Sequence
  Sense Oligo
agucaagcaguucuguauc

SEQ ID NO: 55418 - RNA, 19 nt, Artificial Sequence
  Antisense Oligo
gauacagaacugcuugacu

SEQ ID NO: 55419 - RNA, 19 nt, Artificial Sequence
  Sense Oligo
gucaagcaguucuguaucc

SEQ ID NO: 55420 - RNA, 19 nt, Artificial Sequence
  Antisense Oligo
ggauacagaacugcuugac

SEQ ID NO: 55421 - RNA, 19 nt, Artificial Sequence
  Sense Oligo
ggguguaccuggugcggaa

SEQ ID NO: 55422 - RNA, 19 nt, Artificial Sequence
  Antisense Oligo
uuccgcaccagguacaccc

SEQ ID NO: 55423 - RNA, 19 nt, Artificial Sequence
  Sense Oligo
gguguaccuggugcggaag

SEQ ID NO: 55424 - RNA, 19 nt, Artificial Sequence
  Antisense Oligo
cuuccgcaccagguacacc

SEQ ID NO: 55425 - RNA, 19 nt, Artificial Sequence
  Sense Oligo
gauggaguucgugcagggc

SEQ ID NO: 55426 - RNA, 19 nt, Artificial Sequence
  Antisense Oligo
gcccugcacgaacuccauc

SEQ ID NO: 55427 - RNA, 19 nt, Artificial Sequence
  Sense Oligo
auggaguucgugcagggcc

SEQ ID NO: 55428 - RNA, 19 nt, Artificial Sequence
  Antisense Oligo
ggcccugcacgaacuccau

SEQ ID NO: 55429 - RNA, 19 nt, Artificial Sequence
  Sense Oligo
uggaguucgugcagggccu

SEQ ID NO: 55430 - RNA, 19 nt, Artificial Sequence
  Antisense Oligo
aggcccugcacgaacucca

SEQ ID NO: 55431 - RNA, 19 nt, Artificial Sequence
  Sense Oligo
gaguucgugcagggccucu

SEQ ID NO: 55432 - RNA, 19 nt, Artificial Sequence
  Antisense Oligo
agaggcccugcacgaacuc

SEQ ID NO: 55433 - RNA, 19 nt, Artificial Sequence
  Sense Oligo
aguucgugcagggccucuc

SEQ ID NO: 55434 - RNA, 19 nt, Artificial Sequence
  Antisense Oligo
gagaggcccugcacgaacu

SEQ ID NO: 55435 - RNA, 19 nt, Artificial Sequence
  Sense Oligo
ggguguuucccaaggacgu

SEQ ID NO: 55436 - RNA, 19 nt, Artificial Sequence
  Antisense Oligo
acguccuugggaaacaccc

SEQ ID NO: 55437 - RNA, 19 nt, Artificial Sequence
  Sense Oligo
gguguuucccaaggacguu

SEQ ID NO: 55438 - RNA, 19 nt, Artificial Sequence
  Antisense Oligo
aacguccuugggaaacacc

SEQ ID NO: 55439 - RNA, 19 nt, Artificial Sequence
  Sense Oligo
guguuucccaaggacguug

SEQ ID NO: 55440 - RNA, 19 nt, Artificial Sequence
  Antisense Oligo
caacguccuugggaaacac

SEQ ID NO: 55441 - RNA, 19 nt, Artificial Sequence
  Sense Oligo
uguuucccaaggacguugu

SEQ ID NO: 55442 - RNA, 19 nt, Artificial Sequence
  Antisense Oligo
acaacguccuugggaaaca

SEQ ID NO: 55443 - RNA, 19 nt, Artificial Sequence
  Sense Oligo
guuucccaaggacguuguc

SEQ ID NO: 55444 - RNA, 19 nt, Artificial Sequence
  Antisense Oligo
gacaacguccuugggaaac

SEQ ID NO: 55445 - RNA, 19 nt, Artificial Sequence
  Sense Oligo
uuucccaaggacguuguca

SEQ ID NO: 55446 - RNA, 19 nt, Artificial Sequence
  Antisense Oligo
ugacaacguccuugggaaa

SEQ ID NO: 55447 - RNA, 19 nt, Artificial Sequence
  Sense Oligo
uucccaaggacguugucaa

SEQ ID NO: 55448 - RNA, 19 nt, Artificial Sequence
  Antisense Oligo
uugacaacguccuugggaa

SEQ ID NO: 55449 - RNA, 19 nt, Artificial Sequence
  Sense Oligo
ucccaaggacguugucaag

SEQ ID NO: 55450 - RNA, 19 nt, Artificial Sequence
  Antisense Oligo
cuugacaacguccuuggga

SEQ ID NO: 55451 - RNA, 19 nt, Artificial Sequence
  Sense Oligo
cccaaggacguugucaagc

SEQ ID NO: 55452 - RNA, 19 nt, Artificial Sequence
  Antisense Oligo
gcuugacaacguccuuggg

SEQ ID NO: 55453 - RNA, 19 nt, Artificial Sequence
  Sense Oligo
ccaaggacguugucaagca

SEQ ID NO: 55454 - RNA, 19 nt, Artificial Sequence
  Antisense Oligo
ugcuugacaacguccuugg

SEQ ID NO: 55455 - RNA, 19 nt, Artificial Sequence
  Sense Oligo
caaggacguugucaagcag

SEQ ID NO: 55456 - RNA, 19 nt, Artificial Sequence
  Antisense Oligo
cugcuugacaacguccuug

SEQ ID NO: 55457 - RNA, 19 nt, Artificial Sequence
  Sense Oligo
aaggacguugucaagcagc

SEQ ID NO: 55458 - RNA, 19 nt, Artificial Sequence
  Antisense Oligo
gcugcuugacaacguccuu

SEQ ID NO: 55459 - RNA, 19 nt, Artificial Sequence
  Sense Oligo
aggacguugucaagcagca

SEQ ID NO: 55460 - RNA, 19 nt, Artificial Sequence
  Antisense Oligo
ugcugcuugacaacguccu

SEQ ID NO: 55461 - RNA, 19 nt, Artificial Sequence
  Sense Oligo
guugucaagcagcagguga

SEQ ID NO: 55462 - RNA, 19 nt, Artificial Sequence
  Antisense Oligo
ucaccugcugcuugacaac

SEQ ID NO: 55463 - RNA, 19 nt, Artificial Sequence
  Sense Oligo
uugucaagcagcaggugag

SEQ ID NO: 55464 - RNA, 19 nt, Artificial Sequence
  Antisense Oligo
cucaccugcugcuugacaa

SEQ ID NO: 55465 - RNA, 19 nt, Artificial Sequence
  Sense Oligo
cccuacccucacacccuac

SEQ ID NO: 55466 - RNA, 19 nt, Artificial Sequence
  Antisense Oligo
guagggugugaggguaggg

SEQ ID NO: 55467 - RNA, 19 nt, Artificial Sequence
  Sense Oligo
ccuacccucacacccuacc

SEQ ID NO: 55468 - RNA, 19 nt, Artificial Sequence
  Antisense Oligo
gguagggugugaggguagg

SEQ ID NO: 55469 - RNA, 19 nt, Artificial Sequence
  Sense Oligo
cccaccacauacccucaua

SEQ ID NO: 55470 - RNA, 19 nt, Artificial Sequence
  Antisense Oligo
uaugaggguaugugguggg

SEQ ID NO: 55471 - RNA, 19 nt, Artificial Sequence
  Sense Oligo
ccaccacauacccucauac

SEQ ID NO: 55472 - RNA, 19 nt, Artificial Sequence
  Antisense Oligo
guaugaggguauguggugg

SEQ ID NO: 55473 - RNA, 19 nt, Artificial Sequence
  Sense Oligo
accacauacccucauaccc

SEQ ID NO: 55474 - RNA, 19 nt, Artificial Sequence
  Antisense Oligo
ggguaugaggguauguggu

SEQ ID NO: 55475 - RNA, 19 nt, Artificial Sequence
  Sense Oligo
cccacaccucacccucaca

SEQ ID NO: 55476 - RNA, 19 nt, Artificial Sequence
  Antisense Oligo
ugugagggugagguguggg

SEQ ID NO: 55477 - RNA, 19 nt, Artificial Sequence
  Sense Oligo
cccacaccucacccucaca

SEQ ID NO: 55478 - RNA, 19 nt, Artificial Sequence
  Antisense Oligo
ugugagggugagguguggg

SEQ ID NO: 55479 - RNA, 19 nt, Artificial Sequence
  Sense Oligo
ccucacacccagggauggu

SEQ ID NO: 55480 - RNA, 19 nt, Artificial Sequence
  Antisense Oligo
accaucccugggugugagg

SEQ ID NO: 55481 - RNA, 19 nt, Artificial Sequence
  Sense Oligo
acccagggauggugccacu

SEQ ID NO: 55482 - RNA, 19 nt, Artificial Sequence
  Antisense Oligo
aguggcaccaucccugggu

SEQ ID NO: 55483 - RNA, 19 nt, Artificial Sequence
  Sense Oligo
agggauggugccacugcuu

SEQ ID NO: 55484 - RNA, 19 nt, Artificial Sequence
  Antisense Oligo
aagcaguggcaccaucccu

SEQ ID NO: 55485 - RNA, 19 nt, Artificial Sequence
  Sense Oligo
gggauggugccacugcuuc

SEQ ID NO: 55486 - RNA, 19 nt, Artificial Sequence
  Antisense Oligo
gaagcaguggcaccauccc

SEQ ID NO: 55487 - RNA, 19 nt, Artificial Sequence
  Sense Oligo
ggauggugccacugcuucc

SEQ ID NO: 55488 - RNA, 19 nt, Artificial Sequence
  Antisense Oligo
ggaagcaguggcaccaucc

SEQ ID NO: 55489 - RNA, 19 nt, Artificial Sequence
  Sense Oligo
auggugccacugcuuccgc

SEQ ID NO: 55490 - RNA, 19 nt, Artificial Sequence
  Antisense Oligo
gcggaagcaguggcaccau

SEQ ID NO: 55491 - RNA, 19 nt, Artificial Sequence
  Sense Oligo
gugccacugcuuccgcguu

SEQ ID NO: 55492 - RNA, 19 nt, Artificial Sequence
  Antisense Oligo
aacgcggaagcaguggcac

SEQ ID NO: 55493 - RNA, 19 nt, Artificial Sequence
  Sense Oligo
ugccacugcuuccgcguuc

SEQ ID NO: 55494 - RNA, 19 nt, Artificial Sequence
  Antisense Oligo
gaacgcggaagcaguggca

SEQ ID NO: 55495 - RNA, 19 nt, Artificial Sequence
  Sense Oligo
guuccgccugcccuuagca

SEQ ID NO: 55496 - RNA, 19 nt, Artificial Sequence
  Antisense Oligo
ugcuaagggcaggcggaac

SEQ ID NO: 55497 - RNA, 19 nt, Artificial Sequence
  Sense Oligo
uuccgccugcccuuagcau

SEQ ID NO: 55498 - RNA, 19 nt, Artificial Sequence
  Antisense Oligo
augcuaagggcaggcggaa

SEQ ID NO: 55499 - RNA, 19 nt, Artificial Sequence
  Sense Oligo
aaccugccgcuugucuguc

SEQ ID NO: 55500 - RNA, 19 nt, Artificial Sequence
  Antisense Oligo
gacagacaagcggcagguu

SEQ ID NO: 55501 - RNA, 19 nt, Artificial Sequence
  Sense Oligo
accugccgcuugucugucu

SEQ ID NO: 55502 - RNA, 19 nt, Artificial Sequence
  Antisense Oligo
agacagacaagcggcaggu

SEQ ID NO: 55503 - RNA, 19 nt, Artificial Sequence
  Sense Oligo
ccugccgcuugucugucug

SEQ ID NO: 55504 - RNA, 19 nt, Artificial Sequence
  Antisense Oligo
cagacagacaagcggcagg

SEQ ID NO: 55505 - RNA, 19 nt, Artificial Sequence
  Sense Oligo
ugccgcuugucugucuggu

SEQ ID NO: 55506 - RNA, 19 nt, Artificial Sequence
  Antisense Oligo
accagacagacaagcggca

SEQ ID NO: 55507 - RNA, 19 nt, Artificial Sequence
  Sense Oligo
gccgcuugucugucugguc

SEQ ID NO: 55508 - RNA, 19 nt, Artificial Sequence
  Antisense Oligo
gaccagacagacaagcggc

SEQ ID NO: 55509 - RNA, 19 nt, Artificial Sequence
  Sense Oligo
ccgcuugucugucuggucc

SEQ ID NO: 55510 - RNA, 19 nt, Artificial Sequence
  Antisense Oligo
ggaccagacagacaagcgg

SEQ ID NO: 55511 - RNA, 19 nt, Artificial Sequence
  Sense Oligo
cgcuugucugucugguccu

SEQ ID NO: 55512 - RNA, 19 nt, Artificial Sequence
  Antisense Oligo
aggaccagacagacaagcg

SEQ ID NO: 55513 - RNA, 19 nt, Artificial Sequence
  Sense Oligo
gcuugucugucugguccuu

SEQ ID NO: 55514 - RNA, 19 nt, Artificial Sequence
  Antisense Oligo
aaggaccagacagacaagc

SEQ ID NO: 55515 - RNA, 19 nt, Artificial Sequence
  Sense Oligo
cuugucugucugguccuuu

SEQ ID NO: 55516 - RNA, 19 nt, Artificial Sequence
  Antisense Oligo
aaaggaccagacagacaag

SEQ ID NO: 55517 - RNA, 19 nt, Artificial Sequence
  Sense Oligo
uugucugucugguccuuug

SEQ ID NO: 55518 - RNA, 19 nt, Artificial Sequence
  Antisense Oligo
caaaggaccagacagacaa

SEQ ID NO: 55519 - RNA, 19 nt, Artificial Sequence
  Sense Oligo
ugucugucugguccuuugu

SEQ ID NO: 55520 - RNA, 19 nt, Artificial Sequence
  Antisense Oligo
acaaaggaccagacagaca

SEQ ID NO: 55521 - RNA, 19 nt, Artificial Sequence
  Sense Oligo
ugucugguccuuugucucu

SEQ ID NO: 55522 - RNA, 19 nt, Artificial Sequence
  Antisense Oligo
agagacaaaggaccagaca

SEQ ID NO: 55523 - RNA, 19 nt, Artificial Sequence
  Sense Oligo
gucugguccuuugucucug

SEQ ID NO: 55524 - RNA, 19 nt, Artificial Sequence
  Antisense Oligo
cagagacaaaggaccagac

SEQ ID NO: 55525 - RNA, 19 nt, Artificial Sequence
  Sense Oligo
uugucucugugcuucagcu

SEQ ID NO: 55526 - RNA, 19 nt, Artificial Sequence
  Antisense Oligo
agcugaagcacagagacaa

SEQ ID NO: 55527 - RNA, 19 nt, Artificial Sequence
  Sense Oligo
ugucucugugcuucagcug

SEQ ID NO: 55528 - RNA, 19 nt, Artificial Sequence
  Antisense Oligo
cagcugaagcacagagaca

SEQ ID NO: 55529 - RNA, 19 nt, Artificial Sequence
  Sense Oligo
gugcuucagcugauuugcc

SEQ ID NO: 55530 - RNA, 19 nt, Artificial Sequence
  Antisense Oligo
ggcaaaucagcugaagcac

SEQ ID NO: 55531 - RNA, 19 nt, Artificial Sequence
  Sense Oligo
ugcuucagcugauuugccc

SEQ ID NO: 55532 - RNA, 19 nt, Artificial Sequence
  Antisense Oligo
gggcaaaucagcugaagca

SEQ ID NO: 55533 - RNA, 19 nt, Artificial Sequence
  Sense Oligo
cccagcuugugaucauguu

SEQ ID NO: 55534 - RNA, 19 nt, Artificial Sequence
  Antisense Oligo
aacaugaucacaagcuggg

SEQ ID NO: 55535 - RNA, 19 nt, Artificial Sequence
  Sense Oligo
ccagcuugugaucauguuu

SEQ ID NO: 55536 - RNA, 19 nt, Artificial Sequence
  Antisense Oligo
aaacaugaucacaagcugg

SEQ ID NO: 55537 - RNA, 19 nt, Artificial Sequence
  Sense Oligo
uugugaucauguuuacacu

SEQ ID NO: 55538 - RNA, 19 nt, Artificial Sequence
  Antisense Oligo
aguguaaacaugaucacaa

SEQ ID NO: 55539 - RNA, 19 nt, Artificial Sequence
  Sense Oligo
ugugaucauguuuacacug

SEQ ID NO: 55540 - RNA, 19 nt, Artificial Sequence
  Antisense Oligo
caguguaaacaugaucaca

SEQ ID NO: 55541 - RNA, 19 nt, Artificial Sequence
  Sense Oligo
gugaucauguuuacacugc

SEQ ID NO: 55542 - RNA, 19 nt, Artificial Sequence
  Antisense Oligo
gcaguguaaacaugaucac

SEQ ID NO: 55543 - RNA, 19 nt, Artificial Sequence
  Sense Oligo
ucauguuuacacugccugc

SEQ ID NO: 55544 - RNA, 19 nt, Artificial Sequence
  Antisense Oligo
gcaggcaguguaaacauga

SEQ ID NO: 55545 - RNA, 19 nt, Artificial Sequence
  Sense Oligo
cauguuuacacugccugcu

SEQ ID NO: 55546 - RNA, 19 nt, Artificial Sequence
  Antisense Oligo
agcaggcaguguaaacaug

SEQ ID NO: 55547 - RNA, 19 nt, Artificial Sequence
  Sense Oligo
acacugccugcuguagggc

SEQ ID NO: 55548 - RNA, 19 nt, Artificial Sequence
  Antisense Oligo
gcccuacagcaggcagugu

SEQ ID NO: 55549 - RNA, 19 nt, Artificial Sequence
  Sense Oligo
ugcuguagggccaagguga

SEQ ID NO: 55550 - RNA, 19 nt, Artificial Sequence
  Antisense Oligo
ucaccuuggcccuacagca

SEQ ID NO: 55551 - RNA, 19 nt, Artificial Sequence
  Sense Oligo
gcuguagggccaaggugag

SEQ ID NO: 55552 - RNA, 19 nt, Artificial Sequence
  Antisense Oligo
cucaccuuggcccuacagc

SEQ ID NO: 55553 - RNA, 19 nt, Artificial Sequence
  Sense Oligo
cuguagggccaaggugagg

SEQ ID NO: 55554 - RNA, 19 nt, Artificial Sequence
  Antisense Oligo
ccucaccuuggcccuacag

SEQ ID NO: 55555 - RNA, 19 nt, Artificial Sequence
  Sense Oligo
uguagggccaaggugaggg

SEQ ID NO: 55556 - RNA, 19 nt, Artificial Sequence
  Antisense Oligo
cccucaccuuggcccuaca

SEQ ID NO: 55557 - RNA, 19 nt, Artificial Sequence
  Sense Oligo
acucaccucagagcuucuu

SEQ ID NO: 55558 - RNA, 19 nt, Artificial Sequence
  Antisense Oligo
aagaagcucugaggugagu

SEQ ID NO: 55559 - RNA, 19 nt, Artificial Sequence
  Sense Oligo
accucagagcuucuuuaau

SEQ ID NO: 55560 - RNA, 19 nt, Artificial Sequence
  Antisense Oligo
auuaaagaagcucugaggu

SEQ ID NO: 55561 - RNA, 19 nt, Artificial Sequence
  Sense Oligo
ccucagagcuucuuuaauu

SEQ ID NO: 55562 - RNA, 19 nt, Artificial Sequence
  Antisense Oligo
aauuaaagaagcucugagg

SEQ ID NO: 55563 - RNA, 19 nt, Artificial Sequence
  Sense Oligo
cucagagcuucuuuaauua

SEQ ID NO: 55564 - RNA, 19 nt, Artificial Sequence
  Antisense Oligo
uaauuaaagaagcucugag

SEQ ID NO: 55565 - RNA, 19 nt, Artificial Sequence
  Sense Oligo
ucagagcuucuuuaauuag

SEQ ID NO: 55566 - RNA, 19 nt, Artificial Sequence
  Antisense Oligo
cuaauuaaagaagcucuga

SEQ ID NO: 55567 - RNA, 19 nt, Artificial Sequence
  Sense Oligo
cagagcuucuuuaauuagg

SEQ ID NO: 55568 - RNA, 19 nt, Artificial Sequence
  Antisense Oligo
ccuaauuaaagaagcucug

SEQ ID NO: 55569 - RNA, 19 nt, Artificial Sequence
  Sense Oligo
agagcuucuuuaauuaggc

SEQ ID NO: 55570 - RNA, 19 nt, Artificial Sequence
  Antisense Oligo
gccuaauuaaagaagcucu

SEQ ID NO: 55571 - RNA, 19 nt, Artificial Sequence
  Sense Oligo
gagcuucuuuaauuaggca

SEQ ID NO: 55572 - RNA, 19 nt, Artificial Sequence
  Antisense Oligo
ugccuaauuaaagaagcuc

SEQ ID NO: 55573 - RNA, 19 nt, Artificial Sequence
  Sense Oligo
uucuuuaauuaggcaucac

SEQ ID NO: 55574 - RNA, 19 nt, Artificial Sequence
  Antisense Oligo
gugaugccuaauuaaagaa

SEQ ID NO: 55575 - RNA, 19 nt, Artificial Sequence
  Sense Oligo
ucuuuaauuaggcaucacu

SEQ ID NO: 55576 - RNA, 19 nt, Artificial Sequence
  Antisense Oligo
agugaugccuaauuaaaga

SEQ ID NO: 55577 - RNA, 19 nt, Artificial Sequence
  Sense Oligo
uuaauuaggcaucacuucu

SEQ ID NO: 55578 - RNA, 19 nt, Artificial Sequence
  Antisense Oligo
agaagugaugccuaauuaa

SEQ ID NO: 55579 - RNA, 19 nt, Artificial Sequence
  Sense Oligo
uaauuaggcaucacuucua

SEQ ID NO: 55580 - RNA, 19 nt, Artificial Sequence
  Antisense Oligo
uagaagugaugccuaauua

SEQ ID NO: 55581 - RNA, 19 nt, Artificial Sequence
  Sense Oligo
uaggcaucacuucuaauug

SEQ ID NO: 55582 - RNA, 19 nt, Artificial Sequence
  Antisense Oligo
caauuagaagugaugccua

SEQ ID NO: 55583 - RNA, 19 nt, Artificial Sequence
  Sense Oligo
aggcaucacuucuaauuga

SEQ ID NO: 55584 - RNA, 19 nt, Artificial Sequence
  Antisense Oligo
ucaauuagaagugaugccu

SEQ ID NO: 55585 - RNA, 19 nt, Artificial Sequence
  Sense Oligo
ggcaucacuucuaauugaa

SEQ ID NO: 55586 - RNA, 19 nt, Artificial Sequence
  Antisense Oligo
uucaauuagaagugaugcc

SEQ ID NO: 55587 - RNA, 19 nt, Artificial Sequence
  Sense Oligo
gcaucacuucuaauugaau

SEQ ID NO: 55588 - RNA, 19 nt, Artificial Sequence
  Antisense Oligo
auucaauuagaagugaugc

SEQ ID NO: 55589 - RNA, 19 nt, Artificial Sequence
  Sense Oligo
acauucuuguggccuuugc

SEQ ID NO: 55590 - RNA, 19 nt, Artificial Sequence
  Antisense Oligo
gcaaaggccacaagaaugu

SEQ ID NO: 55591 - RNA, 19 nt, Artificial Sequence
  Sense Oligo
cauucuuguggccuuugcu

SEQ ID NO: 55592 - RNA, 19 nt, Artificial Sequence
  Antisense Oligo
agcaaaggccacaagaaug

SEQ ID NO: 55593 - RNA, 19 nt, Artificial Sequence
  Sense Oligo
auucuuguggccuuugcuu

SEQ ID NO: 55594 - RNA, 19 nt, Artificial Sequence
  Antisense Oligo
aagcaaaggccacaagaau

SEQ ID NO: 55595 - RNA, 19 nt, Artificial Sequence
  Sense Oligo
uucuuguggccuuugcuuu

SEQ ID NO: 55596 - RNA, 19 nt, Artificial Sequence
  Antisense Oligo
aaagcaaaggccacaagaa

SEQ ID NO: 55597 - RNA, 19 nt, Artificial Sequence
  Sense Oligo
ucuuguggccuuugcuuuc

SEQ ID NO: 55598 - RNA, 19 nt, Artificial Sequence
  Antisense Oligo
gaaagcaaaggccacaaga

SEQ ID NO: 55599 - RNA, 19 nt, Artificial Sequence
  Sense Oligo
aacguaguucagcuugcaa

SEQ ID NO: 55600 - RNA, 19 nt, Artificial Sequence
  Antisense Oligo
uugcaagcugaacuacguu

SEQ ID NO: 55601 - RNA, 19 nt, Artificial Sequence
  Sense Oligo
acguaguucagcuugcaag

SEQ ID NO: 55602 - RNA, 19 nt, Artificial Sequence
  Antisense Oligo
cuugcaagcugaacuacgu

SEQ ID NO: 55603 - RNA, 19 nt, Artificial Sequence
  Sense Oligo
cguaguucagcuugcaagg

SEQ ID NO: 55604 - RNA, 19 nt, Artificial Sequence
  Antisense Oligo
ccuugcaagcugaacuacg

SEQ ID NO: 55605 - RNA, 19 nt, Artificial Sequence
  Sense Oligo
uaguucagcuugcaaggug

SEQ ID NO: 55606 - RNA, 19 nt, Artificial Sequence
  Antisense Oligo
caccuugcaagcugaacua

SEQ ID NO: 55607 - RNA, 19 nt, Artificial Sequence
  Sense Oligo
aguucagcuugcaaggugc

SEQ ID NO: 55608 - RNA, 19 nt, Artificial Sequence
  Antisense Oligo
gcaccuugcaagcugaacu

SEQ ID NO: 55609 - RNA, 19 nt, Artificial Sequence
  Sense Oligo
guucagcuugcaaggugcg

SEQ ID NO: 55610 - RNA, 19 nt, Artificial Sequence
  Antisense Oligo
cgcaccuugcaagcugaac

SEQ ID NO: 55611 - RNA, 19 nt, Artificial Sequence
  Sense Oligo
uucagcuugcaaggugcga

SEQ ID NO: 55612 - RNA, 19 nt, Artificial Sequence
  Antisense Oligo
ucgcaccuugcaagcugaa

SEQ ID NO: 55613 - RNA, 19 nt, Artificial Sequence
  Sense Oligo
ucagcuugcaaggugcgac

SEQ ID NO: 55614 - RNA, 19 nt, Artificial Sequence
  Antisense Oligo
gucgcaccuugcaagcuga

SEQ ID NO: 55615 - RNA, 19 nt, Artificial Sequence
  Sense Oligo
acuaggaauagaagaauug

SEQ ID NO: 55616 - RNA, 19 nt, Artificial Sequence
  Antisense Oligo
caauucuucuauuccuagu

SEQ ID NO: 55617 - RNA, 19 nt, Artificial Sequence
  Sense Oligo
cuaggaauagaagaauugc

SEQ ID NO: 55618 - RNA, 19 nt, Artificial Sequence
  Antisense Oligo
gcaauucuucuauuccuag

SEQ ID NO: 55619 - RNA, 19 nt, Artificial Sequence
  Sense Oligo
uaggaauagaagaauugca

SEQ ID NO: 55620 - RNA, 19 nt, Artificial Sequence
  Antisense Oligo
ugcaauucuucuauuccua

SEQ ID NO: 55621 - RNA, 19 nt, Artificial Sequence
  Sense Oligo
aggaauagaagaauugcag

SEQ ID NO: 55622 - RNA, 19 nt, Artificial Sequence
  Antisense Oligo
cugcaauucuucuauuccu

SEQ ID NO: 55623 - RNA, 19 nt, Artificial Sequence
  Sense Oligo
ggaauagaagaauugcaga

SEQ ID NO: 55624 - RNA, 19 nt, Artificial Sequence
  Antisense Oligo
ucugcaauucuucuauucc

SEQ ID NO: 55625 - RNA, 19 nt, Artificial Sequence
  Sense Oligo
uagaagaauugcagaagag

SEQ ID NO: 55626 - RNA, 19 nt, Artificial Sequence
  Antisense Oligo
cucuucugcaauucuucua

SEQ ID NO: 55627 - RNA, 19 nt, Artificial Sequence
  Sense Oligo
agaagaauugcagaagagg

SEQ ID NO: 55628 - RNA, 19 nt, Artificial Sequence
  Antisense Oligo
ccucuucugcaauucuucu

SEQ ID NO: 55629 - RNA, 19 nt, Artificial Sequence
  Sense Oligo
gaagaauugcagaagaggc

SEQ ID NO: 55630 - RNA, 19 nt, Artificial Sequence
  Antisense Oligo
gccucuucugcaauucuuc

SEQ ID NO: 55631 - RNA, 19 nt, Artificial Sequence
  Sense Oligo
aagaauugcagaagaggcu

SEQ ID NO: 55632 - RNA, 19 nt, Artificial Sequence
  Antisense Oligo
agccucuucugcaauucuu

SEQ ID NO: 55633 - RNA, 19 nt, Artificial Sequence
  Sense Oligo
agaauugcagaagaggcuu

SEQ ID NO: 55634 - RNA, 19 nt, Artificial Sequence
  Antisense Oligo
aagccucuucugcaauucu

SEQ ID NO: 55635 - RNA, 19 nt, Artificial Sequence
  Sense Oligo
ucucaccuguaauuccagc

SEQ ID NO: 55636 - RNA, 19 nt, Artificial Sequence
  Antisense Oligo
gcuggaauuacaggugaga

SEQ ID NO: 55637 - RNA, 19 nt, Artificial Sequence
  Sense Oligo
cucaccuguaauuccagca

SEQ ID NO: 55638 - RNA, 19 nt, Artificial Sequence
  Antisense Oligo
ugcuggaauuacaggugag

SEQ ID NO: 55639 - RNA, 19 nt, Artificial Sequence
  Sense Oligo
ucaccuguaauuccagcac

SEQ ID NO: 55640 - RNA, 19 nt, Artificial Sequence
  Antisense Oligo
gugcuggaauuacagguga

SEQ ID NO: 55641 - RNA, 19 nt, Artificial Sequence
  Sense Oligo
guaauuccagcacuuuggg

SEQ ID NO: 55642 - RNA, 19 nt, Artificial Sequence
  Antisense Oligo
cccaaagugcuggaauuac

SEQ ID NO: 55643 - RNA, 19 nt, Artificial Sequence
  Sense Oligo
uaauuccagcacuuuggga

SEQ ID NO: 55644 - RNA, 19 nt, Artificial Sequence
  Antisense Oligo
ucccaaagugcuggaauua

SEQ ID NO: 55645 - RNA, 19 nt, Artificial Sequence
  Sense Oligo
uccagcacuuugggaggcc

SEQ ID NO: 55646 - RNA, 19 nt, Artificial Sequence
  Antisense Oligo
ggccucccaaagugcugga

SEQ ID NO: 55647 - RNA, 19 nt, Artificial Sequence
  Sense Oligo
cagcacuuugggaggccga

SEQ ID NO: 55648 - RNA, 19 nt, Artificial Sequence
  Antisense Oligo
ucggccucccaaagugcug

SEQ ID NO: 55649 - RNA, 19 nt, Artificial Sequence
  Sense Oligo
agcacuuugggaggccgag

SEQ ID NO: 55650 - RNA, 19 nt, Artificial Sequence
  Antisense Oligo
cucggccucccaaagugcu

SEQ ID NO: 55651 - RNA, 19 nt, Artificial Sequence
  Sense Oligo
acuuugggaggccgaggca

SEQ ID NO: 55652 - RNA, 19 nt, Artificial Sequence
  Antisense Oligo
ugccucggccucccaaagu

SEQ ID NO: 55653 - RNA, 19 nt, Artificial Sequence
  Sense Oligo
cgaggcaggcggaucacuu

SEQ ID NO: 55654 - RNA, 19 nt, Artificial Sequence
  Antisense Oligo
aagugauccgccugccucg

SEQ ID NO: 55655 - RNA, 19 nt, Artificial Sequence
  Sense Oligo
gaggcaggcggaucacuug

SEQ ID NO: 55656 - RNA, 19 nt, Artificial Sequence
  Antisense Oligo
caagugauccgccugccuc

SEQ ID NO: 55657 - RNA, 19 nt, Artificial Sequence
  Sense Oligo
aggcaggcggaucacuugu

SEQ ID NO: 55658 - RNA, 19 nt, Artificial Sequence
  Antisense Oligo
acaagugauccgccugccu

SEQ ID NO: 55659 - RNA, 19 nt, Artificial Sequence
  Sense Oligo
ggcaggcggaucacuugug

SEQ ID NO: 55660 - RNA, 19 nt, Artificial Sequence
  Antisense Oligo
cacaagugauccgccugcc

SEQ ID NO: 55661 - RNA, 19 nt, Artificial Sequence
  Sense Oligo
cuuguggucaggaguuugu

SEQ ID NO: 55662 - RNA, 19 nt, Artificial Sequence
  Antisense Oligo
acaaacuccugaccacaag

SEQ ID NO: 55663 - RNA, 19 nt, Artificial Sequence
  Sense Oligo
uuguggucaggaguuuguc

SEQ ID NO: 55664 - RNA, 19 nt, Artificial Sequence
  Antisense Oligo
gacaaacuccugaccacaa

SEQ ID NO: 55665 - RNA, 19 nt, Artificial Sequence
  Sense Oligo
uguggucaggaguuuguca

SEQ ID NO: 55666 - RNA, 19 nt, Artificial Sequence
  Antisense Oligo
ugacaaacuccugaccaca

SEQ ID NO: 55667 - RNA, 19 nt, Artificial Sequence
  Sense Oligo
guggucaggaguuugucaa

SEQ ID NO: 55668 - RNA, 19 nt, Artificial Sequence
  Antisense Oligo
uugacaaacuccugaccac

SEQ ID NO: 55669 - RNA, 19 nt, Artificial Sequence
  Sense Oligo
uggucaggaguuugucaag

SEQ ID NO: 55670 - RNA, 19 nt, Artificial Sequence
  Antisense Oligo
cuugacaaacuccugacca

SEQ ID NO: 55671 - RNA, 19 nt, Artificial Sequence
  Sense Oligo
ggucaggaguuugucaaga

SEQ ID NO: 55672 - RNA, 19 nt, Artificial Sequence
  Antisense Oligo
ucuugacaaacuccugacc

SEQ ID NO: 55673 - RNA, 19 nt, Artificial Sequence
  Sense Oligo
ugucaagaccagccuggcc

SEQ ID NO: 55674 - RNA, 19 nt, Artificial Sequence
  Antisense Oligo
ggccaggcuggucuugaca

SEQ ID NO: 55675 - RNA, 19 nt, Artificial Sequence
  Sense Oligo
gucaagaccagccuggcca

SEQ ID NO: 55676 - RNA, 19 nt, Artificial Sequence
  Antisense Oligo
uggccaggcuggucuugac

SEQ ID NO: 55677 - RNA, 19 nt, Artificial Sequence
  Sense Oligo
ucaagaccagccuggccaa

SEQ ID NO: 55678 - RNA, 19 nt, Artificial Sequence
  Antisense Oligo
uuggccaggcuggucuuga

SEQ ID NO: 55679 - RNA, 19 nt, Artificial Sequence
  Sense Oligo
caagaccagccuggccaac

SEQ ID NO: 55680 - RNA, 19 nt, Artificial Sequence
  Antisense Oligo
guuggccaggcuggucuug

SEQ ID NO: 55681 - RNA, 19 nt, Artificial Sequence
  Sense Oligo
ccuugucucuacuucaaag

SEQ ID NO: 55682 - RNA, 19 nt, Artificial Sequence
  Antisense Oligo
cuuugaaguagagacaagg

SEQ ID NO: 55683 - RNA, 19 nt, Artificial Sequence
  Sense Oligo
cuugucucuacuucaaaga

SEQ ID NO: 55684 - RNA, 19 nt, Artificial Sequence
  Antisense Oligo
ucuuugaaguagagacaag

SEQ ID NO: 55685 - RNA, 19 nt, Artificial Sequence
  Sense Oligo
uugucucuacuucaaagaa

SEQ ID NO: 55686 - RNA, 19 nt, Artificial Sequence
  Antisense Oligo
uucuuugaaguagagacaa

SEQ ID NO: 55687 - RNA, 19 nt, Artificial Sequence
  Sense Oligo
gugcuuguaaucccagcua

SEQ ID NO: 55688 - RNA, 19 nt, Artificial Sequence
  Antisense Oligo
uagcugggauuacaagcac

SEQ ID NO: 55689 - RNA, 19 nt, Artificial Sequence
  Sense Oligo
ugcuuguaaucccagcuag

SEQ ID NO: 55690 - RNA, 19 nt, Artificial Sequence
  Antisense Oligo
cuagcugggauuacaagca

SEQ ID NO: 55691 - RNA, 19 nt, Artificial Sequence
  Sense Oligo
gcuuguaaucccagcuagu

SEQ ID NO: 55692 - RNA, 19 nt, Artificial Sequence
  Antisense Oligo
acuagcugggauuacaagc

SEQ ID NO: 55693 - RNA, 19 nt, Artificial Sequence
  Sense Oligo
cuuguaaucccagcuaguc

SEQ ID NO: 55694 - RNA, 19 nt, Artificial Sequence
  Antisense Oligo
gacuagcugggauuacaag

SEQ ID NO: 55695 - RNA, 19 nt, Artificial Sequence
  Sense Oligo
uuguaaucccagcuagucg

SEQ ID NO: 55696 - RNA, 19 nt, Artificial Sequence
  Antisense Oligo
cgacuagcugggauuacaa

SEQ ID NO: 55697 - RNA, 19 nt, Artificial Sequence
  Sense Oligo
uguaaucccagcuagucgg

SEQ ID NO: 55698 - RNA, 19 nt, Artificial Sequence
  Antisense Oligo
ccgacuagcugggauuaca

SEQ ID NO: 55699 - RNA, 19 nt, Artificial Sequence
  Sense Oligo
gagguugcagugagccgag

SEQ ID NO: 55700 - RNA, 19 nt, Artificial Sequence
  Antisense Oligo
cucggcucacugcaaccuc

SEQ ID NO: 55701 - RNA, 19 nt, Artificial Sequence
  Sense Oligo
ggcuucaaggccucucagu

SEQ ID NO: 55702 - RNA, 19 nt, Artificial Sequence
  Antisense Oligo
acugagaggccuugaagcc

SEQ ID NO: 55703 - RNA, 19 nt, Artificial Sequence
  Sense Oligo
gcuucaaggccucucagug

SEQ ID NO: 55704 - RNA, 19 nt, Artificial Sequence
  Antisense Oligo
cacugagaggccuugaagc

SEQ ID NO: 55705 - RNA, 19 nt, Artificial Sequence
  Sense Oligo
cuucaaggccucucagugg

SEQ ID NO: 55706 - RNA, 19 nt, Artificial Sequence
  Antisense Oligo
ccacugagaggccuugaag

SEQ ID NO: 55707 - RNA, 19 nt, Artificial Sequence
  Sense Oligo
uucaaggccucucaguggu

SEQ ID NO: 55708 - RNA, 19 nt, Artificial Sequence
  Antisense Oligo
accacugagaggccuugaa

SEQ ID NO: 55709 - RNA, 19 nt, Artificial Sequence
  Sense Oligo
ucaaggccucucagugguc

SEQ ID NO: 55710 - RNA, 19 nt, Artificial Sequence
  Antisense Oligo
gaccacugagaggccuuga

SEQ ID NO: 55711 - RNA, 19 nt, Artificial Sequence
  Sense Oligo
caaggccucucaguggucc

SEQ ID NO: 55712 - RNA, 19 nt, Artificial Sequence
  Antisense Oligo
ggaccacugagaggccuug

SEQ ID NO: 55713 - RNA, 19 nt, Artificial Sequence
  Sense Oligo
aaggccucucagugguccu

SEQ ID NO: 55714 - RNA, 19 nt, Artificial Sequence
  Antisense Oligo
aggaccacugagaggccuu

SEQ ID NO: 55715 - RNA, 19 nt, Artificial Sequence
  Sense Oligo
ucucagugguccuuuccag

SEQ ID NO: 55716 - RNA, 19 nt, Artificial Sequence
  Antisense Oligo
cuggaaaggaccacugaga

SEQ ID NO: 55717 - RNA, 19 nt, Artificial Sequence
  Sense Oligo
cucagugguccuuuccaga

SEQ ID NO: 55718 - RNA, 19 nt, Artificial Sequence
  Antisense Oligo
ucuggaaaggaccacugag

SEQ ID NO: 55719 - RNA, 19 nt, Artificial Sequence
  Sense Oligo
ucagugguccuuuccagau

SEQ ID NO: 55720 - RNA, 19 nt, Artificial Sequence
  Antisense Oligo
aucuggaaaggaccacuga

SEQ ID NO: 55721 - RNA, 19 nt, Artificial Sequence
  Sense Oligo
cagugguccuuuccagaua

SEQ ID NO: 55722 - RNA, 19 nt, Artificial Sequence
  Antisense Oligo
uaucuggaaaggaccacug

SEQ ID NO: 55723 - RNA, 19 nt, Artificial Sequence
  Sense Oligo
agugguccuuuccagauac

SEQ ID NO: 55724 - RNA, 19 nt, Artificial Sequence
  Antisense Oligo
guaucuggaaaggaccacu

SEQ ID NO: 55725 - RNA, 19 nt, Artificial Sequence
  Sense Oligo
gugguccuuuccagauacc

SEQ ID NO: 55726 - RNA, 19 nt, Artificial Sequence
  Antisense Oligo
gguaucuggaaaggaccac

SEQ ID NO: 55727 - RNA, 19 nt, Artificial Sequence
  Sense Oligo
ugguccuuuccagauaccc

SEQ ID NO: 55728 - RNA, 19 nt, Artificial Sequence
  Antisense Oligo
ggguaucuggaaaggacca

SEQ ID NO: 55729 - RNA, 19 nt, Artificial Sequence
  Sense Oligo
gguccuuuccagauaccca

SEQ ID NO: 55730 - RNA, 19 nt, Artificial Sequence
  Antisense Oligo
uggguaucuggaaaggacc

SEQ ID NO: 55731 - RNA, 19 nt, Artificial Sequence
  Sense Oligo
guccuuuccagauacccag

SEQ ID NO: 55732 - RNA, 19 nt, Artificial Sequence
  Antisense Oligo
cuggguaucuggaaaggac

SEQ ID NO: 55733 - RNA, 19 nt, Artificial Sequence
  Sense Oligo
uccuuuccagauacccaga

SEQ ID NO: 55734 - RNA, 19 nt, Artificial Sequence
  Antisense Oligo
ucuggguaucuggaaagga

SEQ ID NO: 55735 - RNA, 19 nt, Artificial Sequence
  Sense Oligo
ccuuuccagauacccagaa

SEQ ID NO: 55736 - RNA, 19 nt, Artificial Sequence
  Antisense Oligo
uucuggguaucuggaaagg

SEQ ID NO: 55737 - RNA, 19 nt, Artificial Sequence
  Sense Oligo
ccggcacuguuugacuacc

SEQ ID NO: 55738 - RNA, 19 nt, Artificial Sequence
  Antisense Oligo
gguagucaaacagugccgg

SEQ ID NO: 55739 - RNA, 19 nt, Artificial Sequence
  Sense Oligo
cggcacuguuugacuacca

SEQ ID NO: 55740 - RNA, 19 nt, Artificial Sequence
  Antisense Oligo
ugguagucaaacagugccg

SEQ ID NO: 55741 - RNA, 19 nt, Artificial Sequence
  Sense Oligo
ggcacuguuugacuaccac

SEQ ID NO: 55742 - RNA, 19 nt, Artificial Sequence
  Antisense Oligo
gugguagucaaacagugcc

SEQ ID NO: 55743 - RNA, 19 nt, Artificial Sequence
  Sense Oligo
ggguuuagaguugacauga

SEQ ID NO: 55744 - RNA, 19 nt, Artificial Sequence
  Antisense Oligo
ucaugucaacucuaaaccc

SEQ ID NO: 55745 - RNA, 19 nt, Artificial Sequence
  Sense Oligo
gguuuagaguugacaugac

SEQ ID NO: 55746 - RNA, 19 nt, Artificial Sequence
  Antisense Oligo
gucaugucaacucuaaacc

SEQ ID NO: 55747 - RNA, 19 nt, Artificial Sequence
  Sense Oligo
guuuagaguugacaugacu

SEQ ID NO: 55748 - RNA, 19 nt, Artificial Sequence
  Antisense Oligo
agucaugucaacucuaaac

SEQ ID NO: 55749 - RNA, 19 nt, Artificial Sequence
  Sense Oligo
ugacaugacuugagccacc

SEQ ID NO: 55750 - RNA, 19 nt, Artificial Sequence
  Antisense Oligo
gguggcucaagucauguca

SEQ ID NO: 55751 - RNA, 19 nt, Artificial Sequence
  Sense Oligo
ggcauucccugcacuugca

SEQ ID NO: 55752 - RNA, 19 nt, Artificial Sequence
  Antisense Oligo
ugcaagugcagggaaugcc

SEQ ID NO: 55753 - RNA, 19 nt, Artificial Sequence
  Sense Oligo
uucccugcacuugcaccuc

SEQ ID NO: 55754 - RNA, 19 nt, Artificial Sequence
  Antisense Oligo
gaggugcaagugcagggaa

SEQ ID NO: 55755 - RNA, 19 nt, Artificial Sequence
  Sense Oligo
ucccugcacuugcaccucu

SEQ ID NO: 55756 - RNA, 19 nt, Artificial Sequence
  Antisense Oligo
agaggugcaagugcaggga

SEQ ID NO: 55757 - RNA, 19 nt, Artificial Sequence
  Sense Oligo
cccugcacuugcaccucuu

SEQ ID NO: 55758 - RNA, 19 nt, Artificial Sequence
  Antisense Oligo
aagaggugcaagugcaggg

SEQ ID NO: 55759 - RNA, 19 nt, Artificial Sequence
  Sense Oligo
ccugcacuugcaccucuuc

SEQ ID NO: 55760 - RNA, 19 nt, Artificial Sequence
  Antisense Oligo
gaagaggugcaagugcagg

SEQ ID NO: 55761 - RNA, 19 nt, Artificial Sequence
  Sense Oligo
cugcacuugcaccucuucg

SEQ ID NO: 55762 - RNA, 19 nt, Artificial Sequence
  Antisense Oligo
cgaagaggugcaagugcag

SEQ ID NO: 55763 - RNA, 19 nt, Artificial Sequence
  Sense Oligo
ugcacuugcaccucuucgu

SEQ ID NO: 55764 - RNA, 19 nt, Artificial Sequence
  Antisense Oligo
acgaagaggugcaagugca

SEQ ID NO: 55765 - RNA, 19 nt, Artificial Sequence
  Sense Oligo
gcacuugcaccucuucguc

SEQ ID NO: 55766 - RNA, 19 nt, Artificial Sequence
  Antisense Oligo
gacgaagaggugcaagugc

SEQ ID NO: 55767 - RNA, 19 nt, Artificial Sequence
  Sense Oligo
cacuugcaccucuucgucu

SEQ ID NO: 55768 - RNA, 19 nt, Artificial Sequence
  Antisense Oligo
agacgaagaggugcaagug

SEQ ID NO: 55769 - RNA, 19 nt, Artificial Sequence
  Sense Oligo
acuugcaccucuucgucua

SEQ ID NO: 55770 - RNA, 19 nt, Artificial Sequence
  Antisense Oligo
uagacgaagaggugcaagu

SEQ ID NO: 55771 - RNA, 19 nt, Artificial Sequence
  Sense Oligo
cuugcaccucuucgucuac

SEQ ID NO: 55772 - RNA, 19 nt, Artificial Sequence
  Antisense Oligo
guagacgaagaggugcaag

SEQ ID NO: 55773 - RNA, 19 nt, Artificial Sequence
  Sense Oligo
cucuucgucuacugaggag

SEQ ID NO: 55774 - RNA, 19 nt, Artificial Sequence
  Antisense Oligo
cuccucaguagacgaagag

SEQ ID NO: 55775 - RNA, 19 nt, Artificial Sequence
  Sense Oligo
ucuucgucuacugaggagg

SEQ ID NO: 55776 - RNA, 19 nt, Artificial Sequence
  Antisense Oligo
ccuccucaguagacgaaga

SEQ ID NO: 55777 - RNA, 19 nt, Artificial Sequence
  Sense Oligo
cuucgucuacugaggagga

SEQ ID NO: 55778 - RNA, 19 nt, Artificial Sequence
  Antisense Oligo
uccuccucaguagacgaag

SEQ ID NO: 55779 - RNA, 19 nt, Artificial Sequence
  Sense Oligo
gucuacugaggaggaagcu

SEQ ID NO: 55780 - RNA, 19 nt, Artificial Sequence
  Antisense Oligo
agcuuccuccucaguagac

SEQ ID NO: 55781 - RNA, 19 nt, Artificial Sequence
  Sense Oligo
gaggaagcucccugcgaag

SEQ ID NO: 55782 - RNA, 19 nt, Artificial Sequence
  Antisense Oligo
cuucgcagggagcuuccuc

SEQ ID NO: 55783 - RNA, 19 nt, Artificial Sequence
  Sense Oligo
aggaagcucccugcgaaga

SEQ ID NO: 55784 - RNA, 19 nt, Artificial Sequence
  Antisense Oligo
ucuucgcagggagcuuccu

SEQ ID NO: 55785 - RNA, 19 nt, Artificial Sequence
  Sense Oligo
ggaagcucccugcgaagag

SEQ ID NO: 55786 - RNA, 19 nt, Artificial Sequence
  Antisense Oligo
cucuucgcagggagcuucc

SEQ ID NO: 55787 - RNA, 19 nt, Artificial Sequence
  Sense Oligo
gaagcucccugcgaagagg

SEQ ID NO: 55788 - RNA, 19 nt, Artificial Sequence
  Antisense Oligo
ccucuucgcagggagcuuc

SEQ ID NO: 55789 - RNA, 19 nt, Artificial Sequence
  Sense Oligo
cugcgaagagggcaccaga

SEQ ID NO: 55790 - RNA, 19 nt, Artificial Sequence
  Antisense Oligo
ucuggugcccucuucgcag

SEQ ID NO: 55791 - RNA, 19 nt, Artificial Sequence
  Sense Oligo
ugcgaagagggcaccagac

SEQ ID NO: 55792 - RNA, 19 nt, Artificial Sequence
  Antisense Oligo
gucuggugcccucuucgca

SEQ ID NO: 55793 - RNA, 19 nt, Artificial Sequence
  Sense Oligo
gcgaagagggcaccagacu

SEQ ID NO: 55794 - RNA, 19 nt, Artificial Sequence
  Antisense Oligo
agucuggugcccucuucgc

SEQ ID NO: 55795 - RNA, 19 nt, Artificial Sequence
  Sense Oligo
agagggcaccagacugucc

SEQ ID NO: 55796 - RNA, 19 nt, Artificial Sequence
  Antisense Oligo
ggacagucuggugcccucu

SEQ ID NO: 55797 - RNA, 19 nt, Artificial Sequence
  Sense Oligo
gagggcaccagacuguccu

SEQ ID NO: 55798 - RNA, 19 nt, Artificial Sequence
  Antisense Oligo
aggacagucuggugcccuc

SEQ ID NO: 55799 - RNA, 19 nt, Artificial Sequence
  Sense Oligo
agggcaccagacuguccug

SEQ ID NO: 55800 - RNA, 19 nt, Artificial Sequence
  Antisense Oligo
caggacagucuggugcccu

SEQ ID NO: 55801 - RNA, 19 nt, Artificial Sequence
  Sense Oligo
gcaccagacuguccugccu

SEQ ID NO: 55802 - RNA, 19 nt, Artificial Sequence
  Antisense Oligo
aggcaggacagucuggugc

SEQ ID NO: 55803 - RNA, 19 nt, Artificial Sequence
  Sense Oligo
ucaggccaggucagggaau

SEQ ID NO: 55804 - RNA, 19 nt, Artificial Sequence
  Antisense Oligo
auucccugaccuggccuga

SEQ ID NO: 55805 - RNA, 19 nt, Artificial Sequence
  Sense Oligo
aggccaggucagggaaucc

SEQ ID NO: 55806 - RNA, 19 nt, Artificial Sequence
  Antisense Oligo
ggauucccugaccuggccu

SEQ ID NO: 55807 - RNA, 19 nt, Artificial Sequence
  Sense Oligo
accaccugguuccuguacc

SEQ ID NO: 55808 - RNA, 19 nt, Artificial Sequence
  Antisense Oligo
gguacaggaaccagguggu

SEQ ID NO: 55809 - RNA, 19 nt, Artificial Sequence
  Sense Oligo
ccaccugguuccuguaccc

SEQ ID NO: 55810 - RNA, 19 nt, Artificial Sequence
  Antisense Oligo
ggguacaggaaccaggugg

SEQ ID NO: 55811 - RNA, 19 nt, Artificial Sequence
  Sense Oligo
cugguuccuguacccguuc

SEQ ID NO: 55812 - RNA, 19 nt, Artificial Sequence
  Antisense Oligo
gaacggguacaggaaccag

SEQ ID NO: 55813 - RNA, 19 nt, Artificial Sequence
  Sense Oligo
ugguuccuguacccguuca

SEQ ID NO: 55814 - RNA, 19 nt, Artificial Sequence
  Antisense Oligo
ugaacggguacaggaacca

SEQ ID NO: 55815 - RNA, 19 nt, Artificial Sequence
  Sense Oligo
gguuccuguacccguucag

SEQ ID NO: 55816 - RNA, 19 nt, Artificial Sequence
  Antisense Oligo
cugaacggguacaggaacc

SEQ ID NO: 55817 - RNA, 19 nt, Artificial Sequence
  Sense Oligo
guuccuguacccguucaga

SEQ ID NO: 55818 - RNA, 19 nt, Artificial Sequence
  Antisense Oligo
ucugaacggguacaggaac

SEQ ID NO: 55819 - RNA, 19 nt, Artificial Sequence
  Sense Oligo
uuccuguacccguucagac

SEQ ID NO: 55820 - RNA, 19 nt, Artificial Sequence
  Antisense Oligo
gucugaacggguacaggaa

SEQ ID NO: 55821 - RNA, 19 nt, Artificial Sequence
  Sense Oligo
uccuguacccguucagacg

SEQ ID NO: 55822 - RNA, 19 nt, Artificial Sequence
  Antisense Oligo
cgucugaacggguacagga

SEQ ID NO: 55823 - RNA, 19 nt, Artificial Sequence
  Sense Oligo
guucagacgguucuuugca

SEQ ID NO: 55824 - RNA, 19 nt, Artificial Sequence
  Antisense Oligo
ugcaaagaaccgucugaac

SEQ ID NO: 55825 - RNA, 19 nt, Artificial Sequence
  Sense Oligo
uucagacgguucuuugcaa

SEQ ID NO: 55826 - RNA, 19 nt, Artificial Sequence
  Antisense Oligo
uugcaaagaaccgucugaa

SEQ ID NO: 55827 - RNA, 19 nt, Artificial Sequence
  Sense Oligo
ucagacgguucuuugcaag

SEQ ID NO: 55828 - RNA, 19 nt, Artificial Sequence
  Antisense Oligo
cuugcaaagaaccgucuga

SEQ ID NO: 55829 - RNA, 19 nt, Artificial Sequence
  Sense Oligo
caagacauuccucccauug

SEQ ID NO: 55830 - RNA, 19 nt, Artificial Sequence
  Antisense Oligo
caaugggaggaaugucuug

SEQ ID NO: 55831 - RNA, 19 nt, Artificial Sequence
  Sense Oligo
aagacauuccucccauugu

SEQ ID NO: 55832 - RNA, 19 nt, Artificial Sequence
  Antisense Oligo
acaaugggaggaaugucuu

SEQ ID NO: 55833 - RNA, 19 nt, Artificial Sequence
  Sense Oligo
agacauuccucccauuguu

SEQ ID NO: 55834 - RNA, 19 nt, Artificial Sequence
  Antisense Oligo
aacaaugggaggaaugucu

SEQ ID NO: 55835 - RNA, 19 nt, Artificial Sequence
  Sense Oligo
acauuccucccauuguuca

SEQ ID NO: 55836 - RNA, 19 nt, Artificial Sequence
  Antisense Oligo
ugaacaaugggaggaaugu

SEQ ID NO: 55837 - RNA, 19 nt, Artificial Sequence
  Sense Oligo
cauuccucccauuguucac

SEQ ID NO: 55838 - RNA, 19 nt, Artificial Sequence
  Antisense Oligo
gugaacaaugggaggaaug

SEQ ID NO: 55839 - RNA, 19 nt, Artificial Sequence
  Sense Oligo
auuccucccauuguucacc

SEQ ID NO: 55840 - RNA, 19 nt, Artificial Sequence
  Antisense Oligo
ggugaacaaugggaggaau

SEQ ID NO: 55841 - RNA, 19 nt, Artificial Sequence
  Sense Oligo
uuccucccauuguucaccc

SEQ ID NO: 55842 - RNA, 19 nt, Artificial Sequence
  Antisense Oligo
gggugaacaaugggaggaa

SEQ ID NO: 55843 - RNA, 19 nt, Artificial Sequence
  Sense Oligo
aggaccacccaggccagau

SEQ ID NO: 55844 - RNA, 19 nt, Artificial Sequence
  Antisense Oligo
aucuggccugggugguccu

SEQ ID NO: 55845 - RNA, 19 nt, Artificial Sequence
  Sense Oligo
accacccaggccagaugga

SEQ ID NO: 55846 - RNA, 19 nt, Artificial Sequence
  Antisense Oligo
uccaucuggccuggguggu

SEQ ID NO: 55847 - RNA, 19 nt, Artificial Sequence
  Sense Oligo
ccacccaggccagauggau

SEQ ID NO: 55848 - RNA, 19 nt, Artificial Sequence
  Antisense Oligo
auccaucuggccugggugg

SEQ ID NO: 55849 - RNA, 19 nt, Artificial Sequence
  Sense Oligo
cccaggccagauggauagg

SEQ ID NO: 55850 - RNA, 19 nt, Artificial Sequence
  Antisense Oligo
ccuauccaucuggccuggg

SEQ ID NO: 55851 - RNA, 19 nt, Artificial Sequence
  Sense Oligo
ccaggccagauggauaggu

SEQ ID NO: 55852 - RNA, 19 nt, Artificial Sequence
  Antisense Oligo
accuauccaucuggccugg

SEQ ID NO: 55853 - RNA, 19 nt, Artificial Sequence
  Sense Oligo
caggccagauggauaggua

SEQ ID NO: 55854 - RNA, 19 nt, Artificial Sequence
  Antisense Oligo
uaccuauccaucuggccug

SEQ ID NO: 55855 - RNA, 19 nt, Artificial Sequence
  Sense Oligo
aggccagauggauagguac

SEQ ID NO: 55856 - RNA, 19 nt, Artificial Sequence
  Antisense Oligo
guaccuauccaucuggccu

SEQ ID NO: 55857 - RNA, 19 nt, Artificial Sequence
  Sense Oligo
ggccagauggauagguacc

SEQ ID NO: 55858 - RNA, 19 nt, Artificial Sequence
  Antisense Oligo
gguaccuauccaucuggcc

SEQ ID NO: 55859 - RNA, 19 nt, Artificial Sequence
  Sense Oligo
gccagauggauagguaccu

SEQ ID NO: 55860 - RNA, 19 nt, Artificial Sequence
  Antisense Oligo
agguaccuauccaucuggc

SEQ ID NO: 55861 - RNA, 19 nt, Artificial Sequence
  Sense Oligo
ccagauggauagguaccug

SEQ ID NO: 55862 - RNA, 19 nt, Artificial Sequence
  Antisense Oligo
cagguaccuauccaucugg

SEQ ID NO: 55863 - RNA, 19 nt, Artificial Sequence
  Sense Oligo
cagauggauagguaccugg

SEQ ID NO: 55864 - RNA, 19 nt, Artificial Sequence
  Antisense Oligo
ccagguaccuauccaucug

SEQ ID NO: 55865 - RNA, 19 nt, Artificial Sequence
  Sense Oligo
agauggauagguaccuggu

SEQ ID NO: 55866 - RNA, 19 nt, Artificial Sequence
  Antisense Oligo
accagguaccuauccaucu

SEQ ID NO: 55867 - RNA, 19 nt, Artificial Sequence
  Sense Oligo
gauggauagguaccuggug

SEQ ID NO: 55868 - RNA, 19 nt, Artificial Sequence
  Antisense Oligo
caccagguaccuauccauc

SEQ ID NO: 55869 - RNA, 19 nt, Artificial Sequence
  Sense Oligo
auggauagguaccuggugu

SEQ ID NO: 55870 - RNA, 19 nt, Artificial Sequence
  Antisense Oligo
acaccagguaccuauccau

SEQ ID NO: 55871 - RNA, 19 nt, Artificial Sequence
  Sense Oligo
uggauagguaccuggugua

SEQ ID NO: 55872 - RNA, 19 nt, Artificial Sequence
  Antisense Oligo
uacaccagguaccuaucca

SEQ ID NO: 55873 - RNA, 19 nt, Artificial Sequence
  Sense Oligo
uaccugguguacggcgaug

SEQ ID NO: 55874 - RNA, 19 nt, Artificial Sequence
  Antisense Oligo
caucgccguacaccaggua

SEQ ID NO: 55875 - RNA, 19 nt, Artificial Sequence
  Sense Oligo
accugguguacggcgauga

SEQ ID NO: 55876 - RNA, 19 nt, Artificial Sequence
  Antisense Oligo
ucaucgccguacaccaggu

SEQ ID NO: 55877 - RNA, 19 nt, Artificial Sequence
  Sense Oligo
ccugguguacggcgaugaa

SEQ ID NO: 55878 - RNA, 19 nt, Artificial Sequence
  Antisense Oligo
uucaucgccguacaccagg

SEQ ID NO: 55879 - RNA, 19 nt, Artificial Sequence
  Sense Oligo
caaggcucuccgugaugcu

SEQ ID NO: 55880 - RNA, 19 nt, Artificial Sequence
  Antisense Oligo
agcaucacggagagccuug

SEQ ID NO: 55881 - RNA, 19 nt, Artificial Sequence
  Sense Oligo
aaggcucuccgugaugcug

SEQ ID NO: 55882 - RNA, 19 nt, Artificial Sequence
  Antisense Oligo
cagcaucacggagagccuu

SEQ ID NO: 55883 - RNA, 19 nt, Artificial Sequence
  Sense Oligo
aggcucuccgugaugcugu

SEQ ID NO: 55884 - RNA, 19 nt, Artificial Sequence
  Antisense Oligo
acagcaucacggagagccu

SEQ ID NO: 55885 - RNA, 19 nt, Artificial Sequence
  Sense Oligo
gccaaagcuguccucgagu

SEQ ID NO: 55886 - RNA, 19 nt, Artificial Sequence
  Antisense Oligo
acucgaggacagcuuuggc

SEQ ID NO: 55887 - RNA, 19 nt, Artificial Sequence
  Sense Oligo
ccaaagcuguccucgagug

SEQ ID NO: 55888 - RNA, 19 nt, Artificial Sequence
  Antisense Oligo
cacucgaggacagcuuugg

SEQ ID NO: 55889 - RNA, 19 nt, Artificial Sequence
  Sense Oligo
caaagcuguccucgagugc

SEQ ID NO: 55890 - RNA, 19 nt, Artificial Sequence
  Antisense Oligo
gcacucgaggacagcuuug

SEQ ID NO: 55891 - RNA, 19 nt, Artificial Sequence
  Sense Oligo
aaagcuguccucgagugca

SEQ ID NO: 55892 - RNA, 19 nt, Artificial Sequence
  Antisense Oligo
ugcacucgaggacagcuuu

SEQ ID NO: 55893 - RNA, 19 nt, Artificial Sequence
  Sense Oligo
aagcuguccucgagugcaa

SEQ ID NO: 55894 - RNA, 19 nt, Artificial Sequence
  Antisense Oligo
uugcacucgaggacagcuu

SEQ ID NO: 55895 - RNA, 19 nt, Artificial Sequence
  Sense Oligo
agcuguccucgagugcaag

SEQ ID NO: 55896 - RNA, 19 nt, Artificial Sequence
  Antisense Oligo
cuugcacucgaggacagcu

SEQ ID NO: 55897 - RNA, 19 nt, Artificial Sequence
  Sense Oligo
gcuguccucgagugcaagc

SEQ ID NO: 55898 - RNA, 19 nt, Artificial Sequence
  Antisense Oligo
gcuugcacucgaggacagc

SEQ ID NO: 55899 - RNA, 19 nt, Artificial Sequence
  Sense Oligo
cuguccucgagugcaagcc

SEQ ID NO: 55900 - RNA, 19 nt, Artificial Sequence
  Antisense Oligo
ggcuugcacucgaggacag

SEQ ID NO: 55901 - RNA, 19 nt, Artificial Sequence
  Sense Oligo
uguccucgagugcaagcca

SEQ ID NO: 55902 - RNA, 19 nt, Artificial Sequence
  Antisense Oligo
uggcuugcacucgaggaca

SEQ ID NO: 55903 - RNA, 19 nt, Artificial Sequence
  Sense Oligo
guccucgagugcaagccac

SEQ ID NO: 55904 - RNA, 19 nt, Artificial Sequence
  Antisense Oligo
guggcuugcacucgaggac

SEQ ID NO: 55905 - RNA, 19 nt, Artificial Sequence
  Sense Oligo
aagccacugggcauuaaga

SEQ ID NO: 55906 - RNA, 19 nt, Artificial Sequence
  Antisense Oligo
ucuuaaugcccaguggcuu

SEQ ID NO: 55907 - RNA, 19 nt, Artificial Sequence
  Sense Oligo
ugggcauuaagacugcucu

SEQ ID NO: 55908 - RNA, 19 nt, Artificial Sequence
  Antisense Oligo
agagcagucuuaaugccca

SEQ ID NO: 55909 - RNA, 19 nt, Artificial Sequence
  Sense Oligo
gggcauuaagacugcucug

SEQ ID NO: 55910 - RNA, 19 nt, Artificial Sequence
  Antisense Oligo
cagagcagucuuaaugccc

SEQ ID NO: 55911 - RNA, 19 nt, Artificial Sequence
  Sense Oligo
cauuaagacugcucugaag

SEQ ID NO: 55912 - RNA, 19 nt, Artificial Sequence
  Antisense Oligo
cuucagagcagucuuaaug

SEQ ID NO: 55913 - RNA, 19 nt, Artificial Sequence
  Sense Oligo
aagacugcucugaagguag

SEQ ID NO: 55914 - RNA, 19 nt, Artificial Sequence
  Antisense Oligo
cuaccuucagagcagucuu

SEQ ID NO: 55915 - RNA, 19 nt, Artificial Sequence
  Sense Oligo
agacugcucugaagguagg

SEQ ID NO: 55916 - RNA, 19 nt, Artificial Sequence
  Antisense Oligo
ccuaccuucagagcagucu

SEQ ID NO: 55917 - RNA, 19 nt, Artificial Sequence
  Sense Oligo
ugcucugaagguaggaugg

SEQ ID NO: 55918 - RNA, 19 nt, Artificial Sequence
  Antisense Oligo
ccauccuaccuucagagca

SEQ ID NO: 55919 - RNA, 19 nt, Artificial Sequence
  Sense Oligo
gcucugaagguaggauggg

SEQ ID NO: 55920 - RNA, 19 nt, Artificial Sequence
  Antisense Oligo
cccauccuaccuucagagc

SEQ ID NO: 55921 - RNA, 19 nt, Artificial Sequence
  Sense Oligo
cucugaagguaggaugggc

SEQ ID NO: 55922 - RNA, 19 nt, Artificial Sequence
  Antisense Oligo
gcccauccuaccuucagag

SEQ ID NO: 55923 - RNA, 19 nt, Artificial Sequence
  Sense Oligo
ucugaagguaggaugggcc

SEQ ID NO: 55924 - RNA, 19 nt, Artificial Sequence
  Antisense Oligo
ggcccauccuaccuucaga

SEQ ID NO: 55925 - RNA, 19 nt, Artificial Sequence
  Sense Oligo
gcccguggcuucucucuga

SEQ ID NO: 55926 - RNA, 19 nt, Artificial Sequence
  Antisense Oligo
ucagagagaagccacgggc

SEQ ID NO: 55927 - RNA, 19 nt, Artificial Sequence
  Sense Oligo
cccguggcuucucucugau

SEQ ID NO: 55928 - RNA, 19 nt, Artificial Sequence
  Antisense Oligo
aucagagagaagccacggg

SEQ ID NO: 55929 - RNA, 19 nt, Artificial Sequence
  Sense Oligo
uggcuucucucugauacca

SEQ ID NO: 55930 - RNA, 19 nt, Artificial Sequence
  Antisense Oligo
ugguaucagagagaagcca

SEQ ID NO: 55931 - RNA, 19 nt, Artificial Sequence
  Sense Oligo
ggcuucucucugauaccag

SEQ ID NO: 55932 - RNA, 19 nt, Artificial Sequence
  Antisense Oligo
cugguaucagagagaagcc

SEQ ID NO: 55933 - RNA, 19 nt, Artificial Sequence
  Sense Oligo
gcuucucucugauaccagg

SEQ ID NO: 55934 - RNA, 19 nt, Artificial Sequence
  Antisense Oligo
ccugguaucagagagaagc

SEQ ID NO: 55935 - RNA, 19 nt, Artificial Sequence
  Sense Oligo
cuucucucugauaccaggu

SEQ ID NO: 55936 - RNA, 19 nt, Artificial Sequence
  Antisense Oligo
accugguaucagagagaag

SEQ ID NO: 55937 - RNA, 19 nt, Artificial Sequence
  Sense Oligo
uucucucugauaccaggug

SEQ ID NO: 55938 - RNA, 19 nt, Artificial Sequence
  Antisense Oligo
caccugguaucagagagaa

SEQ ID NO: 55939 - RNA, 19 nt, Artificial Sequence
  Sense Oligo
cucucugauaccagguggc

SEQ ID NO: 55940 - RNA, 19 nt, Artificial Sequence
  Antisense Oligo
gccaccugguaucagagag

SEQ ID NO: 55941 - RNA, 19 nt, Artificial Sequence
  Sense Oligo
ucucugauaccagguggca

SEQ ID NO: 55942 - RNA, 19 nt, Artificial Sequence
  Antisense Oligo
ugccaccugguaucagaga

SEQ ID NO: 55943 - RNA, 19 nt, Artificial Sequence
  Sense Oligo
cucugauaccagguggcau

SEQ ID NO: 55944 - RNA, 19 nt, Artificial Sequence
  Antisense Oligo
augccaccugguaucagag

SEQ ID NO: 55945 - RNA, 19 nt, Artificial Sequence
  Sense Oligo
ugauaccagguggcauccc

SEQ ID NO: 55946 - RNA, 19 nt, Artificial Sequence
  Antisense Oligo
gggaugccaccugguauca

SEQ ID NO: 55947 - RNA, 19 nt, Artificial Sequence
  Sense Oligo
accagguggcaucccuugg

SEQ ID NO: 55948 - RNA, 19 nt, Artificial Sequence
  Antisense Oligo
ccaagggaugccaccuggu

SEQ ID NO: 55949 - RNA, 19 nt, Artificial Sequence
  Sense Oligo
ccagguggcaucccuugga

SEQ ID NO: 55950 - RNA, 19 nt, Artificial Sequence
  Antisense Oligo
uccaagggaugccaccugg

SEQ ID NO: 55951 - RNA, 19 nt, Artificial Sequence
  Sense Oligo
cagguggcaucccuuggag

SEQ ID NO: 55952 - RNA, 19 nt, Artificial Sequence
  Antisense Oligo
cuccaagggaugccaccug

SEQ ID NO: 55953 - RNA, 19 nt, Artificial Sequence
  Sense Oligo
agguggcaucccuuggagc

SEQ ID NO: 55954 - RNA, 19 nt, Artificial Sequence
  Antisense Oligo
gcuccaagggaugccaccu

SEQ ID NO: 55955 - RNA, 19 nt, Artificial Sequence
  Sense Oligo
guggcaucccuuggagccu

SEQ ID NO: 55956 - RNA, 19 nt, Artificial Sequence
  Antisense Oligo
aggcuccaagggaugccac

SEQ ID NO: 55957 - RNA, 19 nt, Artificial Sequence
  Sense Oligo
aucccuuggagccugcaug

SEQ ID NO: 55958 - RNA, 19 nt, Artificial Sequence
  Antisense Oligo
caugcaggcuccaagggau

SEQ ID NO: 55959 - RNA, 19 nt, Artificial Sequence
  Sense Oligo
ucccuuggagccugcaugu

SEQ ID NO: 55960 - RNA, 19 nt, Artificial Sequence
  Antisense Oligo
acaugcaggcuccaaggga

SEQ ID NO: 55961 - RNA, 19 nt, Artificial Sequence
  Sense Oligo
cccuuggagccugcauguu

SEQ ID NO: 55962 - RNA, 19 nt, Artificial Sequence
  Antisense Oligo
aacaugcaggcuccaaggg

SEQ ID NO: 55963 - RNA, 19 nt, Artificial Sequence
  Sense Oligo
ccuuggagccugcauguuc

SEQ ID NO: 55964 - RNA, 19 nt, Artificial Sequence
  Antisense Oligo
gaacaugcaggcuccaagg

SEQ ID NO: 55965 - RNA, 19 nt, Artificial Sequence
  Sense Oligo
cuuggagccugcauguucc

SEQ ID NO: 55966 - RNA, 19 nt, Artificial Sequence
  Antisense Oligo
ggaacaugcaggcuccaag

SEQ ID NO: 55967 - RNA, 19 nt, Artificial Sequence
  Sense Oligo
ccugcauguucccugguuu

SEQ ID NO: 55968 - RNA, 19 nt, Artificial Sequence
  Antisense Oligo
aaaccagggaacaugcagg

SEQ ID NO: 55969 - RNA, 19 nt, Artificial Sequence
  Sense Oligo
cugcauguucccugguuua

SEQ ID NO: 55970 - RNA, 19 nt, Artificial Sequence
  Antisense Oligo
uaaaccagggaacaugcag

SEQ ID NO: 55971 - RNA, 19 nt, Artificial Sequence
  Sense Oligo
ugcauguucccugguuuau

SEQ ID NO: 55972 - RNA, 19 nt, Artificial Sequence
  Antisense Oligo
auaaaccagggaacaugca

SEQ ID NO: 55973 - RNA, 19 nt, Artificial Sequence
  Sense Oligo
gcauguucccugguuuaug

SEQ ID NO: 55974 - RNA, 19 nt, Artificial Sequence
  Antisense Oligo
cauaaaccagggaacaugc

SEQ ID NO: 55975 - RNA, 19 nt, Artificial Sequence
  Sense Oligo
cauguucccugguuuaugu

SEQ ID NO: 55976 - RNA, 19 nt, Artificial Sequence
  Antisense Oligo
acauaaaccagggaacaug

SEQ ID NO: 55977 - RNA, 19 nt, Artificial Sequence
  Sense Oligo
auguucccugguuuauguc

SEQ ID NO: 55978 - RNA, 19 nt, Artificial Sequence
  Antisense Oligo
gacauaaaccagggaacau

SEQ ID NO: 55979 - RNA, 19 nt, Artificial Sequence
  Sense Oligo
guucccugguuuaugucaa

SEQ ID NO: 55980 - RNA, 19 nt, Artificial Sequence
  Antisense Oligo
uugacauaaaccagggaac

SEQ ID NO: 55981 - RNA, 19 nt, Artificial Sequence
  Sense Oligo
uucccugguuuaugucaaa

SEQ ID NO: 55982 - RNA, 19 nt, Artificial Sequence
  Antisense Oligo
uuugacauaaaccagggaa

SEQ ID NO: 55983 - RNA, 19 nt, Artificial Sequence
  Sense Oligo
cccugguuuaugucaaaug

SEQ ID NO: 55984 - RNA, 19 nt, Artificial Sequence
  Antisense Oligo
cauuugacauaaaccaggg

SEQ ID NO: 55985 - RNA, 19 nt, Artificial Sequence
  Sense Oligo
caaaugaugcagggugaug

SEQ ID NO: 55986 - RNA, 19 nt, Artificial Sequence
  Antisense Oligo
caucacccugcaucauuug

SEQ ID NO: 55987 - RNA, 19 nt, Artificial Sequence
  Sense Oligo
aaaugaugcagggugaugg

SEQ ID NO: 55988 - RNA, 19 nt, Artificial Sequence
  Antisense Oligo
ccaucacccugcaucauuu

SEQ ID NO: 55989 - RNA, 19 nt, Artificial Sequence
  Sense Oligo
ugaugcagggugauggacc

SEQ ID NO: 55990 - RNA, 19 nt, Artificial Sequence
  Antisense Oligo
gguccaucacccugcauca

SEQ ID NO: 55991 - RNA, 19 nt, Artificial Sequence
  Sense Oligo
gaugcagggugauggacca

SEQ ID NO: 55992 - RNA, 19 nt, Artificial Sequence
  Antisense Oligo
ugguccaucacccugcauc

SEQ ID NO: 55993 - RNA, 19 nt, Artificial Sequence
  Sense Oligo
augcagggugauggaccac

SEQ ID NO: 55994 - RNA, 19 nt, Artificial Sequence
  Antisense Oligo
gugguccaucacccugcau

SEQ ID NO: 55995 - RNA, 19 nt, Artificial Sequence
  Sense Oligo
gggugauggaccacugaug

SEQ ID NO: 55996 - RNA, 19 nt, Artificial Sequence
  Antisense Oligo
caucagugguccaucaccc

SEQ ID NO: 55997 - RNA, 19 nt, Artificial Sequence
  Sense Oligo
ggugauggaccacugaugc

SEQ ID NO: 55998 - RNA, 19 nt, Artificial Sequence
  Antisense Oligo
gcaucagugguccaucacc

SEQ ID NO: 55999 - RNA, 19 nt, Artificial Sequence
  Sense Oligo
gcccaucacgugacacugu

SEQ ID NO: 56000 - RNA, 19 nt, Artificial Sequence
  Antisense Oligo
acagugucacgugaugggc

SEQ ID NO: 56001 - RNA, 19 nt, Artificial Sequence
  Sense Oligo
cccaucacgugacacugua

SEQ ID NO: 56002 - RNA, 19 nt, Artificial Sequence
  Antisense Oligo
uacagugucacgugauggg

SEQ ID NO: 56003 - RNA, 19 nt, Artificial Sequence
  Sense Oligo
ccaucacgugacacuguau

SEQ ID NO: 56004 - RNA, 19 nt, Artificial Sequence
  Antisense Oligo
auacagugucacgugaugg

SEQ ID NO: 56005 - RNA, 19 nt, Artificial Sequence
  Sense Oligo
caucacgugacacuguauu

SEQ ID NO: 56006 - RNA, 19 nt, Artificial Sequence
  Antisense Oligo
aauacagugucacgugaug

SEQ ID NO: 56007 - RNA, 19 nt, Artificial Sequence
  Sense Oligo
aucacgugacacuguauug

SEQ ID NO: 56008 - RNA, 19 nt, Artificial Sequence
  Antisense Oligo
caauacagugucacgugau

SEQ ID NO: 56009 - RNA, 19 nt, Artificial Sequence
  Sense Oligo
cgugacacuguauuggaag

SEQ ID NO: 56010 - RNA, 19 nt, Artificial Sequence
  Antisense Oligo
cuuccaauacagugucacg

SEQ ID NO: 56011 - RNA, 19 nt, Artificial Sequence
  Sense Oligo
gugacacuguauuggaagu

SEQ ID NO: 56012 - RNA, 19 nt, Artificial Sequence
  Antisense Oligo
acuuccaauacagugucac

SEQ ID NO: 56013 - RNA, 19 nt, Artificial Sequence
  Sense Oligo
ugacacuguauuggaaguc

SEQ ID NO: 56014 - RNA, 19 nt, Artificial Sequence
  Antisense Oligo
gacuuccaauacaguguca

SEQ ID NO: 56015 - RNA, 19 nt, Artificial Sequence
  Sense Oligo
gacacuguauuggaaguca

SEQ ID NO: 56016 - RNA, 19 nt, Artificial Sequence
  Antisense Oligo
ugacuuccaauacaguguc

SEQ ID NO: 56017 - RNA, 19 nt, Artificial Sequence
  Sense Oligo
cuguauuggaagucacgug

SEQ ID NO: 56018 - RNA, 19 nt, Artificial Sequence
  Antisense Oligo
cacgugacuuccaauacag

SEQ ID NO: 56019 - RNA, 19 nt, Artificial Sequence
  Sense Oligo
uguauuggaagucacgugc

SEQ ID NO: 56020 - RNA, 19 nt, Artificial Sequence
  Antisense Oligo
gcacgugacuuccaauaca

SEQ ID NO: 56021 - RNA, 19 nt, Artificial Sequence
  Sense Oligo
guauuggaagucacgugcc

SEQ ID NO: 56022 - RNA, 19 nt, Artificial Sequence
  Antisense Oligo
ggcacgugacuuccaauac

SEQ ID NO: 56023 - RNA, 19 nt, Artificial Sequence
  Sense Oligo
uauuggaagucacgugccc

SEQ ID NO: 56024 - RNA, 19 nt, Artificial Sequence
  Antisense Oligo
gggcacgugacuuccaaua

SEQ ID NO: 56025 - RNA, 19 nt, Artificial Sequence
  Sense Oligo
auuggaagucacgugccca

SEQ ID NO: 56026 - RNA, 19 nt, Artificial Sequence
  Antisense Oligo
ugggcacgugacuuccaau

SEQ ID NO: 56027 - RNA, 19 nt, Artificial Sequence
  Sense Oligo
uuggaagucacgugcccac

SEQ ID NO: 56028 - RNA, 19 nt, Artificial Sequence
  Antisense Oligo
gugggcacgugacuuccaa

SEQ ID NO: 56029 - RNA, 19 nt, Artificial Sequence
  Sense Oligo
caccuggcuagugugcgug

SEQ ID NO: 56030 - RNA, 19 nt, Artificial Sequence
  Antisense Oligo
cacgcacacuagccaggug

SEQ ID NO: 56031 - RNA, 19 nt, Artificial Sequence
  Sense Oligo
accuggcuagugugcguga

SEQ ID NO: 56032 - RNA, 19 nt, Artificial Sequence
  Antisense Oligo
ucacgcacacuagccaggu

SEQ ID NO: 56033 - RNA, 19 nt, Artificial Sequence
  Sense Oligo
ccuggcuagugugcgugaa

SEQ ID NO: 56034 - RNA, 19 nt, Artificial Sequence
  Antisense Oligo
uucacgcacacuagccagg

SEQ ID NO: 56035 - RNA, 19 nt, Artificial Sequence
  Sense Oligo
acaggacagcuaugacagu

SEQ ID NO: 56036 - RNA, 19 nt, Artificial Sequence
  Antisense Oligo
acugucauagcuguccugu

SEQ ID NO: 56037 - RNA, 19 nt, Artificial Sequence
  Sense Oligo
caggacagcuaugacaguu

SEQ ID NO: 56038 - RNA, 19 nt, Artificial Sequence
  Antisense Oligo
aacugucauagcuguccug

SEQ ID NO: 56039 - RNA, 19 nt, Artificial Sequence
  Sense Oligo
aggacagcuaugacaguug

SEQ ID NO: 56040 - RNA, 19 nt, Artificial Sequence
  Antisense Oligo
caacugucauagcuguccu

SEQ ID NO: 56041 - RNA, 19 nt, Artificial Sequence
  Sense Oligo
ggacagcuaugacaguuga

SEQ ID NO: 56042 - RNA, 19 nt, Artificial Sequence
  Antisense Oligo
ucaacugucauagcugucc

SEQ ID NO: 56043 - RNA, 19 nt, Artificial Sequence
  Sense Oligo
gacagcuaugacaguugag

SEQ ID NO: 56044 - RNA, 19 nt, Artificial Sequence
  Antisense Oligo
cucaacugucauagcuguc

SEQ ID NO: 56045 - RNA, 19 nt, Artificial Sequence
  Sense Oligo
acagcuaugacaguugagc

SEQ ID NO: 56046 - RNA, 19 nt, Artificial Sequence
  Antisense Oligo
gcucaacugucauagcugu

SEQ ID NO: 56047 - RNA, 19 nt, Artificial Sequence
  Sense Oligo
gcuaugacaguugagcugg

SEQ ID NO: 56048 - RNA, 19 nt, Artificial Sequence
  Antisense Oligo
ccagcucaacugucauagc

SEQ ID NO: 56049 - RNA, 19 nt, Artificial Sequence
  Sense Oligo
cuaugacaguugagcuggg

SEQ ID NO: 56050 - RNA, 19 nt, Artificial Sequence
  Antisense Oligo
cccagcucaacugucauag

SEQ ID NO: 56051 - RNA, 19 nt, Artificial Sequence
  Sense Oligo
uaugacaguugagcugggu

SEQ ID NO: 56052 - RNA, 19 nt, Artificial Sequence
  Antisense Oligo
acccagcucaacugucaua

SEQ ID NO: 56053 - RNA, 19 nt, Artificial Sequence
  Sense Oligo
augacaguugagcuggguu

SEQ ID NO: 56054 - RNA, 19 nt, Artificial Sequence
  Antisense Oligo
aacccagcucaacugucau

SEQ ID NO: 56055 - RNA, 19 nt, Artificial Sequence
  Sense Oligo
ugacaguugagcuggguug

SEQ ID NO: 56056 - RNA, 19 nt, Artificial Sequence
  Antisense Oligo
caacccagcucaacuguca

SEQ ID NO: 56057 - RNA, 19 nt, Artificial Sequence
  Sense Oligo
gacaguugagcuggguuga

SEQ ID NO: 56058 - RNA, 19 nt, Artificial Sequence
  Antisense Oligo
ucaacccagcucaacuguc

SEQ ID NO: 56059 - RNA, 19 nt, Artificial Sequence
  Sense Oligo
acaguugagcuggguugac

SEQ ID NO: 56060 - RNA, 19 nt, Artificial Sequence
  Antisense Oligo
gucaacccagcucaacugu

SEQ ID NO: 56061 - RNA, 19 nt, Artificial Sequence
  Sense Oligo
caguugagcuggguugaca

SEQ ID NO: 56062 - RNA, 19 nt, Artificial Sequence
  Antisense Oligo
ugucaacccagcucaacug

SEQ ID NO: 56063 - RNA, 19 nt, Artificial Sequence
  Sense Oligo
aguugagcuggguugacag

SEQ ID NO: 56064 - RNA, 19 nt, Artificial Sequence
  Antisense Oligo
cugucaacccagcucaacu

SEQ ID NO: 56065 - RNA, 19 nt, Artificial Sequence
  Sense Oligo
guugagcuggguugacaga

SEQ ID NO: 56066 - RNA, 19 nt, Artificial Sequence
  Antisense Oligo
ucugucaacccagcucaac

SEQ ID NO: 56067 - RNA, 19 nt, Artificial Sequence
  Sense Oligo
uugagcuggguugacagau

SEQ ID NO: 56068 - RNA, 19 nt, Artificial Sequence
  Antisense Oligo
aucugucaacccagcucaa

SEQ ID NO: 56069 - RNA, 19 nt, Artificial Sequence
  Sense Oligo
ugagcuggguugacagauu

SEQ ID NO: 56070 - RNA, 19 nt, Artificial Sequence
  Antisense Oligo
aaucugucaacccagcuca

SEQ ID NO: 56071 - RNA, 19 nt, Artificial Sequence
  Sense Oligo
gagcuggguugacagauuu

SEQ ID NO: 56072 - RNA, 19 nt, Artificial Sequence
  Antisense Oligo
aaaucugucaacccagcuc

SEQ ID NO: 56073 - RNA, 19 nt, Artificial Sequence
  Sense Oligo
agcuggguugacagauuug

SEQ ID NO: 56074 - RNA, 19 nt, Artificial Sequence
  Antisense Oligo
caaaucugucaacccagcu

SEQ ID NO: 56075 - RNA, 19 nt, Artificial Sequence
  Sense Oligo
gcuggguugacagauuugc

SEQ ID NO: 56076 - RNA, 19 nt, Artificial Sequence
  Antisense Oligo
gcaaaucugucaacccagc

SEQ ID NO: 56077 - RNA, 19 nt, Artificial Sequence
  Sense Oligo
cuggguugacagauuugcu

SEQ ID NO: 56078 - RNA, 19 nt, Artificial Sequence
  Antisense Oligo
agcaaaucugucaacccag

SEQ ID NO: 56079 - RNA, 19 nt, Artificial Sequence
  Sense Oligo
uggguugacagauuugcug

SEQ ID NO: 56080 - RNA, 19 nt, Artificial Sequence
  Antisense Oligo
cagcaaaucugucaaccca

SEQ ID NO: 56081 - RNA, 19 nt, Artificial Sequence
  Sense Oligo
cagauuugcugugucuugc

SEQ ID NO: 56082 - RNA, 19 nt, Artificial Sequence
  Antisense Oligo
gcaagacacagcaaaucug

SEQ ID NO: 56083 - RNA, 19 nt, Artificial Sequence
  Sense Oligo
cugugucuugcugaucugc

SEQ ID NO: 56084 - RNA, 19 nt, Artificial Sequence
  Antisense Oligo
gcagaucagcaagacacag

SEQ ID NO: 56085 - RNA, 19 nt, Artificial Sequence
  Sense Oligo
ugugucuugcugaucugcc

SEQ ID NO: 56086 - RNA, 19 nt, Artificial Sequence
  Antisense Oligo
ggcagaucagcaagacaca

SEQ ID NO: 56087 - RNA, 19 nt, Artificial Sequence
  Sense Oligo
gugucuugcugaucugcca

SEQ ID NO: 56088 - RNA, 19 nt, Artificial Sequence
  Antisense Oligo
uggcagaucagcaagacac

SEQ ID NO: 56089 - RNA, 19 nt, Artificial Sequence
  Sense Oligo
uugcugaucugccaagucc

SEQ ID NO: 56090 - RNA, 19 nt, Artificial Sequence
  Antisense Oligo
ggacuuggcagaucagcaa

SEQ ID NO: 56091 - RNA, 19 nt, Artificial Sequence
  Sense Oligo
ugcugaucugccaagucca

SEQ ID NO: 56092 - RNA, 19 nt, Artificial Sequence
  Antisense Oligo
uggacuuggcagaucagca

SEQ ID NO: 56093 - RNA, 19 nt, Artificial Sequence
  Sense Oligo
gcugaucugccaaguccau

SEQ ID NO: 56094 - RNA, 19 nt, Artificial Sequence
  Antisense Oligo
auggacuuggcagaucagc

SEQ ID NO: 56095 - RNA, 19 nt, Artificial Sequence
  Sense Oligo
cugaucugccaaguccauc

SEQ ID NO: 56096 - RNA, 19 nt, Artificial Sequence
  Antisense Oligo
gauggacuuggcagaucag

SEQ ID NO: 56097 - RNA, 19 nt, Artificial Sequence
  Sense Oligo
ccaaguccaucagcagcgc

SEQ ID NO: 56098 - RNA, 19 nt, Artificial Sequence
  Antisense Oligo
gcgcugcugauggacuugg

SEQ ID NO: 56099 - RNA, 19 nt, Artificial Sequence
  Sense Oligo
caaguccaucagcagcgcc

SEQ ID NO: 56100 - RNA, 19 nt, Artificial Sequence
  Antisense Oligo
ggcgcugcugauggacuug

SEQ ID NO: 56101 - RNA, 19 nt, Artificial Sequence
  Sense Oligo
aaguccaucagcagcgccu

SEQ ID NO: 56102 - RNA, 19 nt, Artificial Sequence
  Antisense Oligo
aggcgcugcugauggacuu

SEQ ID NO: 56103 - RNA, 19 nt, Artificial Sequence
  Sense Oligo
aguccaucagcagcgccuu

SEQ ID NO: 56104 - RNA, 19 nt, Artificial Sequence
  Antisense Oligo
aaggcgcugcugauggacu

SEQ ID NO: 56105 - RNA, 19 nt, Artificial Sequence
  Sense Oligo
guccaucagcagcgccuuu

SEQ ID NO: 56106 - RNA, 19 nt, Artificial Sequence
  Antisense Oligo
aaaggcgcugcugauggac

SEQ ID NO: 56107 - RNA, 19 nt, Artificial Sequence
  Sense Oligo
uccaucagcagcgccuuuu

SEQ ID NO: 56108 - RNA, 19 nt, Artificial Sequence
  Antisense Oligo
aaaaggcgcugcugaugga

SEQ ID NO: 56109 - RNA, 19 nt, Artificial Sequence
  Sense Oligo
ccaucagcagcgccuuuug

SEQ ID NO: 56110 - RNA, 19 nt, Artificial Sequence
  Antisense Oligo
caaaaggcgcugcugaugg

SEQ ID NO: 56111 - RNA, 19 nt, Artificial Sequence
  Sense Oligo
caucagcagcgccuuuuga

SEQ ID NO: 56112 - RNA, 19 nt, Artificial Sequence
  Antisense Oligo
ucaaaaggcgcugcugaug

SEQ ID NO: 56113 - RNA, 19 nt, Artificial Sequence
  Sense Oligo
ucagcagcgccuuuugauu

SEQ ID NO: 56114 - RNA, 19 nt, Artificial Sequence
  Antisense Oligo
aaucaaaaggcgcugcuga

SEQ ID NO: 56115 - RNA, 19 nt, Artificial Sequence
  Sense Oligo
cagcgccuuuugauuuaug

SEQ ID NO: 56116 - RNA, 19 nt, Artificial Sequence
  Antisense Oligo
cauaaaucaaaaggcgcug

SEQ ID NO: 56117 - RNA, 19 nt, Artificial Sequence
  Sense Oligo
agcgccuuuugauuuaugc

SEQ ID NO: 56118 - RNA, 19 nt, Artificial Sequence
  Antisense Oligo
gcauaaaucaaaaggcgcu

SEQ ID NO: 56119 - RNA, 19 nt, Artificial Sequence
  Sense Oligo
gcgccuuuugauuuaugcc

SEQ ID NO: 56120 - RNA, 19 nt, Artificial Sequence
  Antisense Oligo
ggcauaaaucaaaaggcgc

SEQ ID NO: 56121 - RNA, 19 nt, Artificial Sequence
  Sense Oligo
cgccuuuugauuuaugccc

SEQ ID NO: 56122 - RNA, 19 nt, Artificial Sequence
  Antisense Oligo
gggcauaaaucaaaaggcg

SEQ ID NO: 56123 - RNA, 19 nt, Artificial Sequence
  Sense Oligo
gccuuuugauuuaugccca

SEQ ID NO: 56124 - RNA, 19 nt, Artificial Sequence
  Antisense Oligo
ugggcauaaaucaaaaggc

SEQ ID NO: 56125 - RNA, 19 nt, Artificial Sequence
  Sense Oligo
ccuuuugauuuaugcccau

SEQ ID NO: 56126 - RNA, 19 nt, Artificial Sequence
  Antisense Oligo
augggcauaaaucaaaagg

SEQ ID NO: 56127 - RNA, 19 nt, Artificial Sequence
  Sense Oligo
cuuuugauuuaugcccauu

SEQ ID NO: 56128 - RNA, 19 nt, Artificial Sequence
  Antisense Oligo
aaugggcauaaaucaaaag

SEQ ID NO: 56129 - RNA, 19 nt, Artificial Sequence
  Sense Oligo
uuugauuuaugcccauuac

SEQ ID NO: 56130 - RNA, 19 nt, Artificial Sequence
  Antisense Oligo
guaaugggcauaaaucaaa

SEQ ID NO: 56131 - RNA, 19 nt, Artificial Sequence
  Sense Oligo
uugauuuaugcccauuacu

SEQ ID NO: 56132 - RNA, 19 nt, Artificial Sequence
  Antisense Oligo
aguaaugggcauaaaucaa

SEQ ID NO: 56133 - RNA, 19 nt, Artificial Sequence
  Sense Oligo
ugauuuaugcccauuacuu

SEQ ID NO: 56134 - RNA, 19 nt, Artificial Sequence
  Antisense Oligo
aaguaaugggcauaaauca

SEQ ID NO: 56135 - RNA, 19 nt, Artificial Sequence
  Sense Oligo
gauuuaugcccauuacuuc

SEQ ID NO: 56136 - RNA, 19 nt, Artificial Sequence
  Antisense Oligo
gaaguaaugggcauaaauc

SEQ ID NO: 56137 - RNA, 19 nt, Artificial Sequence
  Sense Oligo
auuuaugcccauuacuucc

SEQ ID NO: 56138 - RNA, 19 nt, Artificial Sequence
  Antisense Oligo
ggaaguaaugggcauaaau

SEQ ID NO: 56139 - RNA, 19 nt, Artificial Sequence
  Sense Oligo
uuaugcccauuacuuccuu

SEQ ID NO: 56140 - RNA, 19 nt, Artificial Sequence
  Antisense Oligo
aaggaaguaaugggcauaa

SEQ ID NO: 56141 - RNA, 19 nt, Artificial Sequence
  Sense Oligo
uaugcccauuacuuccuuu

SEQ ID NO: 56142 - RNA, 19 nt, Artificial Sequence
  Antisense Oligo
aaaggaaguaaugggcaua

SEQ ID NO: 56143 - RNA, 19 nt, Artificial Sequence
  Sense Oligo
augcccauuacuuccuuug

SEQ ID NO: 56144 - RNA, 19 nt, Artificial Sequence
  Antisense Oligo
caaaggaaguaaugggcau

SEQ ID NO: 56145 - RNA, 19 nt, Artificial Sequence
  Sense Oligo
ugcccauuacuuccuuuga

SEQ ID NO: 56146 - RNA, 19 nt, Artificial Sequence
  Antisense Oligo
ucaaaggaaguaaugggca

SEQ ID NO: 56147 - RNA, 19 nt, Artificial Sequence
  Sense Oligo
uagcaaaauucauaccuag

SEQ ID NO: 56148 - RNA, 19 nt, Artificial Sequence
  Antisense Oligo
cuagguaugaauuuugcua

SEQ ID NO: 56149 - RNA, 19 nt, Artificial Sequence
  Sense Oligo
agcaaaauucauaccuaga

SEQ ID NO: 56150 - RNA, 19 nt, Artificial Sequence
  Antisense Oligo
ucuagguaugaauuuugcu

SEQ ID NO: 56151 - RNA, 19 nt, Artificial Sequence
  Sense Oligo
caaaauucauaccuagaug

SEQ ID NO: 56152 - RNA, 19 nt, Artificial Sequence
  Antisense Oligo
caucuagguaugaauuuug

SEQ ID NO: 56153 - RNA, 19 nt, Artificial Sequence
  Sense Oligo
uaauucagauaugcaugug

SEQ ID NO: 56154 - RNA, 19 nt, Artificial Sequence
  Antisense Oligo
cacaugcauaucugaauua

SEQ ID NO: 56155 - RNA, 19 nt, Artificial Sequence
  Sense Oligo
aauucagauaugcaugugu

SEQ ID NO: 56156 - RNA, 19 nt, Artificial Sequence
  Antisense Oligo
acacaugcauaucugaauu

SEQ ID NO: 56157 - RNA, 19 nt, Artificial Sequence
  Sense Oligo
auucagauaugcaugugug

SEQ ID NO: 56158 - RNA, 19 nt, Artificial Sequence
  Antisense Oligo
cacacaugcauaucugaau

SEQ ID NO: 56159 - RNA, 19 nt, Artificial Sequence
  Sense Oligo
gauaugcauguguguuuaa

SEQ ID NO: 56160 - RNA, 19 nt, Artificial Sequence
  Antisense Oligo
uuaaacacacaugcauauc

SEQ ID NO: 56161 - RNA, 19 nt, Artificial Sequence
  Sense Oligo
acauauguugguguagugu

SEQ ID NO: 56162 - RNA, 19 nt, Artificial Sequence
  Antisense Oligo
acacuacaccaacauaugu

SEQ ID NO: 56163 - RNA, 19 nt, Artificial Sequence
  Sense Oligo
cauauguugguguagugug

SEQ ID NO: 56164 - RNA, 19 nt, Artificial Sequence
  Antisense Oligo
cacacuacaccaacauaug

SEQ ID NO: 56165 - RNA, 19 nt, Artificial Sequence
  Sense Oligo
auauguugguguagugugg

SEQ ID NO: 56166 - RNA, 19 nt, Artificial Sequence
  Antisense Oligo
ccacacuacaccaacauau

SEQ ID NO: 56167 - RNA, 19 nt, Artificial Sequence
  Sense Oligo
ucuaaccuuuaaauugguc

SEQ ID NO: 56168 - RNA, 19 nt, Artificial Sequence
  Antisense Oligo
gaccaauuuaaagguuaga

SEQ ID NO: 56169 - RNA, 19 nt, Artificial Sequence
  Sense Oligo
cuaaccuuuaaauuggucu

SEQ ID NO: 56170 - RNA, 19 nt, Artificial Sequence
  Antisense Oligo
agaccaauuuaaagguuag

SEQ ID NO: 56171 - RNA, 19 nt, Artificial Sequence
  Sense Oligo
uaaccuuuaaauuggucug

SEQ ID NO: 56172 - RNA, 19 nt, Artificial Sequence
  Antisense Oligo
cagaccaauuuaaagguua

SEQ ID NO: 56173 - RNA, 19 nt, Artificial Sequence
  Sense Oligo
aaccuuuaaauuggucugg

SEQ ID NO: 56174 - RNA, 19 nt, Artificial Sequence
  Antisense Oligo
ccagaccaauuuaaagguu

SEQ ID NO: 56175 - RNA, 19 nt, Artificial Sequence
  Sense Oligo
accuuuaaauuggucuggu

SEQ ID NO: 56176 - RNA, 19 nt, Artificial Sequence
  Antisense Oligo
accagaccaauuuaaaggu

SEQ ID NO: 56177 - RNA, 19 nt, Artificial Sequence
  Sense Oligo
ccuuuaaauuggucugguc

SEQ ID NO: 56178 - RNA, 19 nt, Artificial Sequence
  Antisense Oligo
gaccagaccaauuuaaagg

SEQ ID NO: 56179 - RNA, 19 nt, Artificial Sequence
  Sense Oligo
cuuuaaauuggucuggucu

SEQ ID NO: 56180 - RNA, 19 nt, Artificial Sequence
  Antisense Oligo
agaccagaccaauuuaaag

SEQ ID NO: 56181 - RNA, 19 nt, Artificial Sequence
  Sense Oligo
uuuaaauuggucuggucuu

SEQ ID NO: 56182 - RNA, 19 nt, Artificial Sequence
  Antisense Oligo
aagaccagaccaauuuaaa

SEQ ID NO: 56183 - RNA, 19 nt, Artificial Sequence
  Sense Oligo
uuaaauuggucuggucuug

SEQ ID NO: 56184 - RNA, 19 nt, Artificial Sequence
  Antisense Oligo
caagaccagaccaauuuaa

SEQ ID NO: 56185 - RNA, 19 nt, Artificial Sequence
  Sense Oligo
uaaauuggucuggucuugc

SEQ ID NO: 56186 - RNA, 19 nt, Artificial Sequence
  Antisense Oligo
gcaagaccagaccaauuua

SEQ ID NO: 56187 - RNA, 19 nt, Artificial Sequence
  Sense Oligo
aaauuggucuggucuugcu

SEQ ID NO: 56188 - RNA, 19 nt, Artificial Sequence
  Antisense Oligo
agcaagaccagaccaauuu

SEQ ID NO: 56189 - RNA, 19 nt, Artificial Sequence
  Sense Oligo
uuggucuggucuugcuucc

SEQ ID NO: 56190 - RNA, 19 nt, Artificial Sequence
  Antisense Oligo
ggaagcaagaccagaccaa

SEQ ID NO: 56191 - RNA, 19 nt, Artificial Sequence
  Sense Oligo
uggucuggucuugcuuccu

SEQ ID NO: 56192 - RNA, 19 nt, Artificial Sequence
  Antisense Oligo
aggaagcaagaccagacca

SEQ ID NO: 56193 - RNA, 19 nt, Artificial Sequence
  Sense Oligo
ggucuggucuugcuuccuu

SEQ ID NO: 56194 - RNA, 19 nt, Artificial Sequence
  Antisense Oligo
aaggaagcaagaccagacc

SEQ ID NO: 56195 - RNA, 19 nt, Artificial Sequence
  Sense Oligo
aaaauccucuuucugcuca

SEQ ID NO: 56196 - RNA, 19 nt, Artificial Sequence
  Antisense Oligo
ugagcagaaagaggauuuu

SEQ ID NO: 56197 - RNA, 19 nt, Artificial Sequence
  Sense Oligo
aauccucuuucugcucaga

SEQ ID NO: 56198 - RNA, 19 nt, Artificial Sequence
  Antisense Oligo
ucugagcagaaagaggauu

SEQ ID NO: 56199 - RNA, 19 nt, Artificial Sequence
  Sense Oligo
cugcucagaaguuucuaag

SEQ ID NO: 56200 - RNA, 19 nt, Artificial Sequence
  Antisense Oligo
cuuagaaacuucugagcag

SEQ ID NO: 56201 - RNA, 19 nt, Artificial Sequence
  Sense Oligo
ugcucagaaguuucuaaga

SEQ ID NO: 56202 - RNA, 19 nt, Artificial Sequence
  Antisense Oligo
ucuuagaaacuucugagca

SEQ ID NO: 56203 - RNA, 19 nt, Artificial Sequence
  Sense Oligo
cuaagaccagugaaggagu

SEQ ID NO: 56204 - RNA, 19 nt, Artificial Sequence
  Antisense Oligo
acuccuucacuggucuuag

SEQ ID NO: 56205 - RNA, 19 nt, Artificial Sequence
  Sense Oligo
uaagaccagugaaggaguc

SEQ ID NO: 56206 - RNA, 19 nt, Artificial Sequence
  Antisense Oligo
gacuccuucacuggucuua

SEQ ID NO: 56207 - RNA, 19 nt, Artificial Sequence
  Sense Oligo
aagaccagugaaggaguca

SEQ ID NO: 56208 - RNA, 19 nt, Artificial Sequence
  Antisense Oligo
ugacuccuucacuggucuu

SEQ ID NO: 56209 - RNA, 19 nt, Artificial Sequence
  Sense Oligo
cagugaaggagucagaaga

SEQ ID NO: 56210 - RNA, 19 nt, Artificial Sequence
  Antisense Oligo
ucuucugacuccuucacug

SEQ ID NO: 56211 - RNA, 19 nt, Artificial Sequence
  Sense Oligo
agauggugauuccguugcu

SEQ ID NO: 56212 - RNA, 19 nt, Artificial Sequence
  Antisense Oligo
agcaacggaaucaccaucu

SEQ ID NO: 56213 - RNA, 19 nt, Artificial Sequence
  Sense Oligo
gauggugauuccguugcuu

SEQ ID NO: 56214 - RNA, 19 nt, Artificial Sequence
  Antisense Oligo
aagcaacggaaucaccauc

SEQ ID NO: 56215 - RNA, 19 nt, Artificial Sequence
  Sense Oligo
auggugauuccguugcuuc

SEQ ID NO: 56216 - RNA, 19 nt, Artificial Sequence
  Antisense Oligo
gaagcaacggaaucaccau

SEQ ID NO: 56217 - RNA, 19 nt, Artificial Sequence
  Sense Oligo
uggugauuccguugcuucu

SEQ ID NO: 56218 - RNA, 19 nt, Artificial Sequence
  Antisense Oligo
agaagcaacggaaucacca

SEQ ID NO: 56219 - RNA, 19 nt, Artificial Sequence
  Sense Oligo
ggugauuccguugcuucug

SEQ ID NO: 56220 - RNA, 19 nt, Artificial Sequence
  Antisense Oligo
cagaagcaacggaaucacc

SEQ ID NO: 56221 - RNA, 19 nt, Artificial Sequence
  Sense Oligo
gugauuccguugcuucugu

SEQ ID NO: 56222 - RNA, 19 nt, Artificial Sequence
  Antisense Oligo
acagaagcaacggaaucac

SEQ ID NO: 56223 - RNA, 19 nt, Artificial Sequence
  Sense Oligo
ugauuccguugcuucuguc

SEQ ID NO: 56224 - RNA, 19 nt, Artificial Sequence
  Antisense Oligo
gacagaagcaacggaauca

SEQ ID NO: 56225 - RNA, 19 nt, Artificial Sequence
  Sense Oligo
gauuccguugcuucuguca

SEQ ID NO: 56226 - RNA, 19 nt, Artificial Sequence
  Antisense Oligo
ugacagaagcaacggaauc

SEQ ID NO: 56227 - RNA, 19 nt, Artificial Sequence
  Sense Oligo
ccguugcuucugucauuaa

SEQ ID NO: 56228 - RNA, 19 nt, Artificial Sequence
  Antisense Oligo
uuaaugacagaagcaacgg

SEQ ID NO: 56229 - RNA, 19 nt, Artificial Sequence
  Sense Oligo
cguugcuucugucauuaag

SEQ ID NO: 56230 - RNA, 19 nt, Artificial Sequence
  Antisense Oligo
cuuaaugacagaagcaacg

SEQ ID NO: 56231 - RNA, 19 nt, Artificial Sequence
  Sense Oligo
cuucugucauuaagcuggc

SEQ ID NO: 56232 - RNA, 19 nt, Artificial Sequence
  Antisense Oligo
gccagcuuaaugacagaag

SEQ ID NO: 56233 - RNA, 19 nt, Artificial Sequence
  Sense Oligo
uucugucauuaagcuggcu

SEQ ID NO: 56234 - RNA, 19 nt, Artificial Sequence
  Antisense Oligo
agccagcuuaaugacagaa

SEQ ID NO: 56235 - RNA, 19 nt, Artificial Sequence
  Sense Oligo
ucugucauuaagcuggcug

SEQ ID NO: 56236 - RNA, 19 nt, Artificial Sequence
  Antisense Oligo
cagccagcuuaaugacaga

SEQ ID NO: 56237 - RNA, 19 nt, Artificial Sequence
  Sense Oligo
cugucauuaagcuggcugc

SEQ ID NO: 56238 - RNA, 19 nt, Artificial Sequence
  Antisense Oligo
gcagccagcuuaaugacag

SEQ ID NO: 56239 - RNA, 19 nt, Artificial Sequence
  Sense Oligo
cauuaagcuggcugcuaaa

SEQ ID NO: 56240 - RNA, 19 nt, Artificial Sequence
  Antisense Oligo
uuuagcagccagcuuaaug

SEQ ID NO: 56241 - RNA, 19 nt, Artificial Sequence
  Sense Oligo
auuaagcuggcugcuaaau

SEQ ID NO: 56242 - RNA, 19 nt, Artificial Sequence
  Antisense Oligo
auuuagcagccagcuuaau

SEQ ID NO: 56243 - RNA, 19 nt, Artificial Sequence
  Sense Oligo
uuaagcuggcugcuaaaua

SEQ ID NO: 56244 - RNA, 19 nt, Artificial Sequence
  Antisense Oligo
uauuuagcagccagcuuaa

SEQ ID NO: 56245 - RNA, 19 nt, Artificial Sequence
  Sense Oligo
uaagcuggcugcuaaauau

SEQ ID NO: 56246 - RNA, 19 nt, Artificial Sequence
  Antisense Oligo
auauuuagcagccagcuua

SEQ ID NO: 56247 - RNA, 19 nt, Artificial Sequence
  Sense Oligo
aagcuggcugcuaaauaug

SEQ ID NO: 56248 - RNA, 19 nt, Artificial Sequence
  Antisense Oligo
cauauuuagcagccagcuu

SEQ ID NO: 56249 - RNA, 19 nt, Artificial Sequence
  Sense Oligo
uuguagcccaaaaguugcu

SEQ ID NO: 56250 - RNA, 19 nt, Artificial Sequence
  Antisense Oligo
agcaacuuuugggcuacaa

SEQ ID NO: 56251 - RNA, 19 nt, Artificial Sequence
  Sense Oligo
uguagcccaaaaguugcuc

SEQ ID NO: 56252 - RNA, 19 nt, Artificial Sequence
  Antisense Oligo
gagcaacuuuugggcuaca

SEQ ID NO: 56253 - RNA, 19 nt, Artificial Sequence
  Sense Oligo
guagcccaaaaguugcucg

SEQ ID NO: 56254 - RNA, 19 nt, Artificial Sequence
  Antisense Oligo
cgagcaacuuuugggcuac

SEQ ID NO: 56255 - RNA, 19 nt, Artificial Sequence
  Sense Oligo
uagcccaaaaguugcucgc

SEQ ID NO: 56256 - RNA, 19 nt, Artificial Sequence
  Antisense Oligo
gcgagcaacuuuugggcua

SEQ ID NO: 56257 - RNA, 19 nt, Artificial Sequence
  Sense Oligo
agcccaaaaguugcucgcc

SEQ ID NO: 56258 - RNA, 19 nt, Artificial Sequence
  Antisense Oligo
ggcgagcaacuuuugggcu

SEQ ID NO: 56259 - RNA, 19 nt, Artificial Sequence
  Sense Oligo
gcccaaaaguugcucgcca

SEQ ID NO: 56260 - RNA, 19 nt, Artificial Sequence
  Antisense Oligo
uggcgagcaacuuuugggc

SEQ ID NO: 56261 - RNA, 19 nt, Artificial Sequence
  Sense Oligo
cccaaaaguugcucgccag

SEQ ID NO: 56262 - RNA, 19 nt, Artificial Sequence
  Antisense Oligo
cuggcgagcaacuuuuggg

SEQ ID NO: 56263 - RNA, 19 nt, Artificial Sequence
  Sense Oligo
ccaaaaguugcucgccaga

SEQ ID NO: 56264 - RNA, 19 nt, Artificial Sequence
  Antisense Oligo
ucuggcgagcaacuuuugg

SEQ ID NO: 56265 - RNA, 19 nt, Artificial Sequence
  Sense Oligo
caaaaguugcucgccagaa

SEQ ID NO: 56266 - RNA, 19 nt, Artificial Sequence
  Antisense Oligo
uucuggcgagcaacuuuug

SEQ ID NO: 56267 - RNA, 19 nt, Artificial Sequence
  Sense Oligo
aaaaguugcucgccagaag

SEQ ID NO: 56268 - RNA, 19 nt, Artificial Sequence
  Antisense Oligo
cuucuggcgagcaacuuuu

SEQ ID NO: 56269 - RNA, 19 nt, Artificial Sequence
  Sense Oligo
aaaguugcucgccagaaga

SEQ ID NO: 56270 - RNA, 19 nt, Artificial Sequence
  Antisense Oligo
ucuucuggcgagcaacuuu

SEQ ID NO: 56271 - RNA, 19 nt, Artificial Sequence
  Sense Oligo
aaguugcucgccagaagac

SEQ ID NO: 56272 - RNA, 19 nt, Artificial Sequence
  Antisense Oligo
gucuucuggcgagcaacuu

SEQ ID NO: 56273 - RNA, 19 nt, Artificial Sequence
  Sense Oligo
aguugcucgccagaagacu

SEQ ID NO: 56274 - RNA, 19 nt, Artificial Sequence
  Antisense Oligo
agucuucuggcgagcaacu

SEQ ID NO: 56275 - RNA, 19 nt, Artificial Sequence
  Sense Oligo
ucgccagaagacugcccau

SEQ ID NO: 56276 - RNA, 19 nt, Artificial Sequence
  Antisense Oligo
augggcagucuucuggcga

SEQ ID NO: 56277 - RNA, 19 nt, Artificial Sequence
  Sense Oligo
cgccagaagacugcccaug

SEQ ID NO: 56278 - RNA, 19 nt, Artificial Sequence
  Antisense Oligo
caugggcagucuucuggcg

SEQ ID NO: 56279 - RNA, 19 nt, Artificial Sequence
  Sense Oligo
ccagaagacugcccaugug

SEQ ID NO: 56280 - RNA, 19 nt, Artificial Sequence
  Antisense Oligo
cacaugggcagucuucugg

SEQ ID NO: 56281 - RNA, 19 nt, Artificial Sequence
  Sense Oligo
cagaagacugcccaugugg

SEQ ID NO: 56282 - RNA, 19 nt, Artificial Sequence
  Antisense Oligo
ccacaugggcagucuucug

SEQ ID NO: 56283 - RNA, 19 nt, Artificial Sequence
  Sense Oligo
agaagacugcccauguggg

SEQ ID NO: 56284 - RNA, 19 nt, Artificial Sequence
  Antisense Oligo
cccacaugggcagucuucu

SEQ ID NO: 56285 - RNA, 19 nt, Artificial Sequence
  Sense Oligo
ggcuccuucccuuuuggug

SEQ ID NO: 56286 - RNA, 19 nt, Artificial Sequence
  Antisense Oligo
caccaaaagggaaggagcc

SEQ ID NO: 56287 - RNA, 19 nt, Artificial Sequence
  Sense Oligo
gcuccuucccuuuuggugg

SEQ ID NO: 56288 - RNA, 19 nt, Artificial Sequence
  Antisense Oligo
ccaccaaaagggaaggagc

SEQ ID NO: 56289 - RNA, 19 nt, Artificial Sequence
  Sense Oligo
cuccuucccuuuugguggg

SEQ ID NO: 56290 - RNA, 19 nt, Artificial Sequence
  Antisense Oligo
cccaccaaaagggaaggag

SEQ ID NO: 56291 - RNA, 19 nt, Artificial Sequence
  Sense Oligo
uccuucccuuuuggugggu

SEQ ID NO: 56292 - RNA, 19 nt, Artificial Sequence
  Antisense Oligo
acccaccaaaagggaagga

SEQ ID NO: 56293 - RNA, 19 nt, Artificial Sequence
  Sense Oligo
ccuucccuuuugguggguu

SEQ ID NO: 56294 - RNA, 19 nt, Artificial Sequence
  Antisense Oligo
aacccaccaaaagggaagg

SEQ ID NO: 56295 - RNA, 19 nt, Artificial Sequence
  Sense Oligo
cuucccuuuugguggguug

SEQ ID NO: 56296 - RNA, 19 nt, Artificial Sequence
  Antisense Oligo
caacccaccaaaagggaag

SEQ ID NO: 56297 - RNA, 19 nt, Artificial Sequence
  Sense Oligo
uucccuuuugguggguuga

SEQ ID NO: 56298 - RNA, 19 nt, Artificial Sequence
  Antisense Oligo
ucaacccaccaaaagggaa

SEQ ID NO: 56299 - RNA, 19 nt, Artificial Sequence
  Sense Oligo
ucccuuuugguggguugag

SEQ ID NO: 56300 - RNA, 19 nt, Artificial Sequence
  Antisense Oligo
cucaacccaccaaaaggga

SEQ ID NO: 56301 - RNA, 19 nt, Artificial Sequence
  Sense Oligo
cccuuuugguggguugagg

SEQ ID NO: 56302 - RNA, 19 nt, Artificial Sequence
  Antisense Oligo
ccucaacccaccaaaaggg

SEQ ID NO: 56303 - RNA, 19 nt, Artificial Sequence
  Sense Oligo
ccuuuugguggguugaggg

SEQ ID NO: 56304 - RNA, 19 nt, Artificial Sequence
  Antisense Oligo
cccucaacccaccaaaagg

SEQ ID NO: 56305 - RNA, 19 nt, Artificial Sequence
  Sense Oligo
ugguggguugagggcugag

SEQ ID NO: 56306 - RNA, 19 nt, Artificial Sequence
  Antisense Oligo
cucagcccucaacccacca

SEQ ID NO: 56307 - RNA, 19 nt, Artificial Sequence
  Sense Oligo
uggguugagggcugaggca

SEQ ID NO: 56308 - RNA, 19 nt, Artificial Sequence
  Antisense Oligo
ugccucagcccucaaccca

SEQ ID NO: 56309 - RNA, 19 nt, Artificial Sequence
  Sense Oligo
uugagggcugaggcaugug

SEQ ID NO: 56310 - RNA, 19 nt, Artificial Sequence
  Antisense Oligo
cacaugccucagcccucaa

SEQ ID NO: 56311 - RNA, 19 nt, Artificial Sequence
  Sense Oligo
aaguuucuuuucacaugca

SEQ ID NO: 56312 - RNA, 19 nt, Artificial Sequence
  Antisense Oligo
ugcaugugaaaagaaacuu

SEQ ID NO: 56313 - RNA, 19 nt, Artificial Sequence
  Sense Oligo
aacuucgugggccucuggc

SEQ ID NO: 56314 - RNA, 19 nt, Artificial Sequence
  Antisense Oligo
gccagaggcccacgaaguu

SEQ ID NO: 56315 - RNA, 19 nt, Artificial Sequence
  Sense Oligo
gccucuggcccuuagguag

SEQ ID NO: 56316 - RNA, 19 nt, Artificial Sequence
  Antisense Oligo
cuaccuaagggccagaggc

SEQ ID NO: 56317 - RNA, 19 nt, Artificial Sequence
  Sense Oligo
ccucuggcccuuagguaga

SEQ ID NO: 56318 - RNA, 19 nt, Artificial Sequence
  Antisense Oligo
ucuaccuaagggccagagg

SEQ ID NO: 56319 - RNA, 19 nt, Artificial Sequence
  Sense Oligo
cucuggcccuuagguagau

SEQ ID NO: 56320 - RNA, 19 nt, Artificial Sequence
  Antisense Oligo
aucuaccuaagggccagag

SEQ ID NO: 56321 - RNA, 19 nt, Artificial Sequence
  Sense Oligo
ucuggcccuuagguagauc

SEQ ID NO: 56322 - RNA, 19 nt, Artificial Sequence
  Antisense Oligo
gaucuaccuaagggccaga

SEQ ID NO: 56323 - RNA, 19 nt, Artificial Sequence
  Sense Oligo
cuggcccuuagguagaucu

SEQ ID NO: 56324 - RNA, 19 nt, Artificial Sequence
  Antisense Oligo
agaucuaccuaagggccag

SEQ ID NO: 56325 - RNA, 19 nt, Artificial Sequence
  Sense Oligo
uggcccuuagguagaucug

SEQ ID NO: 56326 - RNA, 19 nt, Artificial Sequence
  Antisense Oligo
cagaucuaccuaagggcca

SEQ ID NO: 56327 - RNA, 19 nt, Artificial Sequence
  Sense Oligo
ccuuagguagaucuggcag

SEQ ID NO: 56328 - RNA, 19 nt, Artificial Sequence
  Antisense Oligo
cugccagaucuaccuaagg

SEQ ID NO: 56329 - RNA, 19 nt, Artificial Sequence
  Sense Oligo
cuuagguagaucuggcagg

SEQ ID NO: 56330 - RNA, 19 nt, Artificial Sequence
  Antisense Oligo
ccugccagaucuaccuaag

SEQ ID NO: 56331 - RNA, 19 nt, Artificial Sequence
  Sense Oligo
uuagguagaucuggcaggc

SEQ ID NO: 56332 - RNA, 19 nt, Artificial Sequence
  Antisense Oligo
gccugccagaucuaccuaa

SEQ ID NO: 56333 - RNA, 19 nt, Artificial Sequence
  Sense Oligo
guagaucuggcaggcagcg

SEQ ID NO: 56334 - RNA, 19 nt, Artificial Sequence
  Antisense Oligo
cgcugccugccagaucuac

SEQ ID NO: 56335 - RNA, 19 nt, Artificial Sequence
  Sense Oligo
uagaucuggcaggcagcgg

SEQ ID NO: 56336 - RNA, 19 nt, Artificial Sequence
  Antisense Oligo
ccgcugccugccagaucua

SEQ ID NO: 56337 - RNA, 19 nt, Artificial Sequence
  Sense Oligo
agaucuggcaggcagcggu

SEQ ID NO: 56338 - RNA, 19 nt, Artificial Sequence
  Antisense Oligo
accgcugccugccagaucu

SEQ ID NO: 56339 - RNA, 19 nt, Artificial Sequence
  Sense Oligo
ucuauccuauaauccuagc

SEQ ID NO: 56340 - RNA, 19 nt, Artificial Sequence
  Antisense Oligo
gcuaggauuauaggauaga

SEQ ID NO: 56341 - RNA, 19 nt, Artificial Sequence
  Sense Oligo
cuauccuauaauccuagca

SEQ ID NO: 56342 - RNA, 19 nt, Artificial Sequence
  Antisense Oligo
ugcuaggauuauaggauag

SEQ ID NO: 56343 - RNA, 19 nt, Artificial Sequence
  Sense Oligo
uauccuauaauccuagcac

SEQ ID NO: 56344 - RNA, 19 nt, Artificial Sequence
  Antisense Oligo
gugcuaggauuauaggaua

SEQ ID NO: 56345 - RNA, 19 nt, Artificial Sequence
  Sense Oligo
gccggacaugguugcgugu

SEQ ID NO: 56346 - RNA, 19 nt, Artificial Sequence
  Antisense Oligo
acacgcaaccauguccggc

SEQ ID NO: 56347 - RNA, 19 nt, Artificial Sequence
  Sense Oligo
ccggacaugguugcgugug

SEQ ID NO: 56348 - RNA, 19 nt, Artificial Sequence
  Antisense Oligo
cacacgcaaccauguccgg

SEQ ID NO: 56349 - RNA, 19 nt, Artificial Sequence
  Sense Oligo
cggacaugguugcgugugc

SEQ ID NO: 56350 - RNA, 19 nt, Artificial Sequence
  Antisense Oligo
gcacacgcaaccauguccg

SEQ ID NO: 56351 - RNA, 19 nt, Artificial Sequence
  Sense Oligo
ggacaugguugcgugugcc

SEQ ID NO: 56352 - RNA, 19 nt, Artificial Sequence
  Antisense Oligo
ggcacacgcaaccaugucc

SEQ ID NO: 56353 - RNA, 19 nt, Artificial Sequence
  Sense Oligo
uugcgugugccuguagucc

SEQ ID NO: 56354 - RNA, 19 nt, Artificial Sequence
  Antisense Oligo
ggacuacaggcacacgcaa

SEQ ID NO: 56355 - RNA, 19 nt, Artificial Sequence
  Sense Oligo
ugcgugugccuguaguccc

SEQ ID NO: 56356 - RNA, 19 nt, Artificial Sequence
  Antisense Oligo
gggacuacaggcacacgca

SEQ ID NO: 56357 - RNA, 19 nt, Artificial Sequence
  Sense Oligo
gcgugugccuguaguccca

SEQ ID NO: 56358 - RNA, 19 nt, Artificial Sequence
  Antisense Oligo
ugggacuacaggcacacgc

SEQ ID NO: 56359 - RNA, 19 nt, Artificial Sequence
  Sense Oligo
gugccuguagucccagcua

SEQ ID NO: 56360 - RNA, 19 nt, Artificial Sequence
  Antisense Oligo
uagcugggacuacaggcac

SEQ ID NO: 56361 - RNA, 19 nt, Artificial Sequence
  Sense Oligo
acugcacuccagccugggu

SEQ ID NO: 56362 - RNA, 19 nt, Artificial Sequence
  Antisense Oligo
acccaggcuggagugcagu

SEQ ID NO: 56363 - RNA, 19 nt, Artificial Sequence
  Sense Oligo
ugcacuccagccuggguga

SEQ ID NO: 56364 - RNA, 19 nt, Artificial Sequence
  Antisense Oligo
ucacccaggcuggagugca

SEQ ID NO: 56365 - RNA, 19 nt, Artificial Sequence
  Sense Oligo
cacuccagccugggugaca

SEQ ID NO: 56366 - RNA, 19 nt, Artificial Sequence
  Antisense Oligo
ugucacccaggcuggagug

SEQ ID NO: 56367 - RNA, 19 nt, Artificial Sequence
  Sense Oligo
acuccagccugggugacag

SEQ ID NO: 56368 - RNA, 19 nt, Artificial Sequence
  Antisense Oligo
cugucacccaggcuggagu

SEQ ID NO: 56369 - RNA, 19 nt, Artificial Sequence
  Sense Oligo
cuccagccugggugacaga

SEQ ID NO: 56370 - RNA, 19 nt, Artificial Sequence
  Antisense Oligo
ucugucacccaggcuggag

SEQ ID NO: 56371 - RNA, 19 nt, Artificial Sequence
  Sense Oligo
uccagccugggugacagag

SEQ ID NO: 56372 - RNA, 19 nt, Artificial Sequence
  Antisense Oligo
cucugucacccaggcugga

SEQ ID NO: 56373 - RNA, 19 nt, Artificial Sequence
  Sense Oligo
cagccugggugacagagca

SEQ ID NO: 56374 - RNA, 19 nt, Artificial Sequence
  Antisense Oligo
ugcucugucacccaggcug

SEQ ID NO: 56375 - RNA, 19 nt, Artificial Sequence
  Sense Oligo
agccugggugacagagcaa

SEQ ID NO: 56376 - RNA, 19 nt, Artificial Sequence
  Antisense Oligo
uugcucugucacccaggcu

SEQ ID NO: 56377 - RNA, 19 nt, Artificial Sequence
  Sense Oligo
gccugggugacagagcaag

SEQ ID NO: 56378 - RNA, 19 nt, Artificial Sequence
  Antisense Oligo
cuugcucugucacccaggc

SEQ ID NO: 56379 - RNA, 19 nt, Artificial Sequence
  Sense Oligo
ccugggugacagagcaaga

SEQ ID NO: 56380 - RNA, 19 nt, Artificial Sequence
  Antisense Oligo
ucuugcucugucacccagg

SEQ ID NO: 56381 - RNA, 19 nt, Artificial Sequence
  Sense Oligo
ggugacagagcaagacucc

SEQ ID NO: 56382 - RNA, 19 nt, Artificial Sequence
  Antisense Oligo
ggagucuugcucugucacc

SEQ ID NO: 56383 - RNA, 19 nt, Artificial Sequence
  Sense Oligo
agcaagacuccaucucaaa

SEQ ID NO: 56384 - RNA, 19 nt, Artificial Sequence
  Antisense Oligo
uuugagauggagucuugcu

SEQ ID NO: 56385 - RNA, 19 nt, Artificial Sequence
  Sense Oligo
gcaagacuccaucucaaaa

SEQ ID NO: 56386 - RNA, 19 nt, Artificial Sequence
  Antisense Oligo
uuuugagauggagucuugc

SEQ ID NO: 56387 - RNA, 19 nt, Artificial Sequence
  Sense Oligo
agauguguugagcuuuuaa

SEQ ID NO: 56388 - RNA, 19 nt, Artificial Sequence
  Antisense Oligo
uuaaaagcucaacacaucu

SEQ ID NO: 56389 - RNA, 19 nt, Artificial Sequence
  Sense Oligo
guguugagcuuuuaaauuc

SEQ ID NO: 56390 - RNA, 19 nt, Artificial Sequence
  Antisense Oligo
gaauuuaaaagcucaacac

SEQ ID NO: 56391 - RNA, 19 nt, Artificial Sequence
  Sense Oligo
aaauucuuacuugauaccc

SEQ ID NO: 56392 - RNA, 19 nt, Artificial Sequence
  Antisense Oligo
ggguaucaaguaagaauuu

SEQ ID NO: 56393 - RNA, 19 nt, Artificial Sequence
  Sense Oligo
aauucuuacuugauacccu

SEQ ID NO: 56394 - RNA, 19 nt, Artificial Sequence
  Antisense Oligo
aggguaucaaguaagaauu

SEQ ID NO: 56395 - RNA, 19 nt, Artificial Sequence
  Sense Oligo
auucuuacuugauacccuu

SEQ ID NO: 56396 - RNA, 19 nt, Artificial Sequence
  Antisense Oligo
aaggguaucaaguaagaau

SEQ ID NO: 56397 - RNA, 19 nt, Artificial Sequence
  Sense Oligo
uucuuacuugauacccuug

SEQ ID NO: 56398 - RNA, 19 nt, Artificial Sequence
  Antisense Oligo
caaggguaucaaguaagaa

SEQ ID NO: 56399 - RNA, 19 nt, Artificial Sequence
  Sense Oligo
ucuuacuugauacccuuga

SEQ ID NO: 56400 - RNA, 19 nt, Artificial Sequence
  Antisense Oligo
ucaaggguaucaaguaaga

SEQ ID NO: 56401 - RNA, 19 nt, Artificial Sequence
  Sense Oligo
cuuacuugauacccuugau

SEQ ID NO: 56402 - RNA, 19 nt, Artificial Sequence
  Antisense Oligo
aucaaggguaucaaguaag

SEQ ID NO: 56403 - RNA, 19 nt, Artificial Sequence
  Sense Oligo
uuacuugauacccuugauu

SEQ ID NO: 56404 - RNA, 19 nt, Artificial Sequence
  Antisense Oligo
aaucaaggguaucaaguaa

SEQ ID NO: 56405 - RNA, 19 nt, Artificial Sequence
  Sense Oligo
uugauacccuugauuuugc

SEQ ID NO: 56406 - RNA, 19 nt, Artificial Sequence
  Antisense Oligo
gcaaaaucaaggguaucaa

SEQ ID NO: 56407 - RNA, 19 nt, Artificial Sequence
  Sense Oligo
ugauacccuugauuuugca

SEQ ID NO: 56408 - RNA, 19 nt, Artificial Sequence
  Antisense Oligo
ugcaaaaucaaggguauca

SEQ ID NO: 56409 - RNA, 19 nt, Artificial Sequence
  Sense Oligo
gauacccuugauuuugcag

SEQ ID NO: 56410 - RNA, 19 nt, Artificial Sequence
  Antisense Oligo
cugcaaaaucaaggguauc

SEQ ID NO: 56411 - RNA, 19 nt, Artificial Sequence
  Sense Oligo
auacccuugauuuugcagg

SEQ ID NO: 56412 - RNA, 19 nt, Artificial Sequence
  Antisense Oligo
ccugcaaaaucaaggguau

SEQ ID NO: 56413 - RNA, 19 nt, Artificial Sequence
  Sense Oligo
uacccuugauuuugcaggc

SEQ ID NO: 56414 - RNA, 19 nt, Artificial Sequence
  Antisense Oligo
gccugcaaaaucaagggua

SEQ ID NO: 56415 - RNA, 19 nt, Artificial Sequence
  Sense Oligo
acccuugauuuugcaggcc

SEQ ID NO: 56416 - RNA, 19 nt, Artificial Sequence
  Antisense Oligo
ggccugcaaaaucaagggu

SEQ ID NO: 56417 - RNA, 19 nt, Artificial Sequence
  Sense Oligo
cccuugauuuugcaggccu

SEQ ID NO: 56418 - RNA, 19 nt, Artificial Sequence
  Antisense Oligo
aggccugcaaaaucaaggg

SEQ ID NO: 56419 - RNA, 19 nt, Artificial Sequence
  Sense Oligo
cuugauuuugcaggccugc

SEQ ID NO: 56420 - RNA, 19 nt, Artificial Sequence
  Antisense Oligo
gcaggccugcaaaaucaag

SEQ ID NO: 56421 - RNA, 19 nt, Artificial Sequence
  Sense Oligo
agccagcagucagccuacu

SEQ ID NO: 56422 - RNA, 19 nt, Artificial Sequence
  Antisense Oligo
aguaggcugacugcuggcu

SEQ ID NO: 56423 - RNA, 19 nt, Artificial Sequence
  Sense Oligo
gccagcagucagccuacuu

SEQ ID NO: 56424 - RNA, 19 nt, Artificial Sequence
  Antisense Oligo
aaguaggcugacugcuggc

SEQ ID NO: 56425 - RNA, 19 nt, Artificial Sequence
  Sense Oligo
ccagcagucagccuacuuc

SEQ ID NO: 56426 - RNA, 19 nt, Artificial Sequence
  Antisense Oligo
gaaguaggcugacugcugg

SEQ ID NO: 56427 - RNA, 19 nt, Artificial Sequence
  Sense Oligo
agcagucagccuacuuccu

SEQ ID NO: 56428 - RNA, 19 nt, Artificial Sequence
  Antisense Oligo
aggaaguaggcugacugcu

SEQ ID NO: 56429 - RNA, 19 nt, Artificial Sequence
  Sense Oligo
gucagccuacuuccuguua

SEQ ID NO: 56430 - RNA, 19 nt, Artificial Sequence
  Antisense Oligo
uaacaggaaguaggcugac

SEQ ID NO: 56431 - RNA, 19 nt, Artificial Sequence
  Sense Oligo
ucagccuacuuccuguuaa

SEQ ID NO: 56432 - RNA, 19 nt, Artificial Sequence
  Antisense Oligo
uuaacaggaaguaggcuga

SEQ ID NO: 56433 - RNA, 19 nt, Artificial Sequence
  Sense Oligo
cagccuacuuccuguuaac

SEQ ID NO: 56434 - RNA, 19 nt, Artificial Sequence
  Antisense Oligo
guuaacaggaaguaggcug

SEQ ID NO: 56435 - RNA, 19 nt, Artificial Sequence
  Sense Oligo
guggcuauuuuguacagau

SEQ ID NO: 56436 - RNA, 19 nt, Artificial Sequence
  Antisense Oligo
aucuguacaaaauagccac

SEQ ID NO: 56437 - RNA, 19 nt, Artificial Sequence
  Sense Oligo
uggcuauuuuguacagauc

SEQ ID NO: 56438 - RNA, 19 nt, Artificial Sequence
  Antisense Oligo
gaucuguacaaaauagcca

SEQ ID NO: 56439 - RNA, 19 nt, Artificial Sequence
  Sense Oligo
ggcuauuuuguacagaucc

SEQ ID NO: 56440 - RNA, 19 nt, Artificial Sequence
  Antisense Oligo
ggaucuguacaaaauagcc

SEQ ID NO: 56441 - RNA, 19 nt, Artificial Sequence
  Sense Oligo
gcuauuuuguacagauccc

SEQ ID NO: 56442 - RNA, 19 nt, Artificial Sequence
  Antisense Oligo
gggaucuguacaaaauagc

SEQ ID NO: 56443 - RNA, 19 nt, Artificial Sequence
  Sense Oligo
agaggugaguaaccgccug

SEQ ID NO: 56444 - RNA, 19 nt, Artificial Sequence
  Antisense Oligo
caggcgguuacucaccucu

SEQ ID NO: 56445 - RNA, 19 nt, Artificial Sequence
  Sense Oligo
gaggugaguaaccgccugc

SEQ ID NO: 56446 - RNA, 19 nt, Artificial Sequence
  Antisense Oligo
gcaggcgguuacucaccuc

SEQ ID NO: 56447 - RNA, 19 nt, Artificial Sequence
  Sense Oligo
aggugaguaaccgccugca

SEQ ID NO: 56448 - RNA, 19 nt, Artificial Sequence
  Antisense Oligo
ugcaggcgguuacucaccu

SEQ ID NO: 56449 - RNA, 19 nt, Artificial Sequence
  Sense Oligo
ccugcagggcuguguucaa

SEQ ID NO: 56450 - RNA, 19 nt, Artificial Sequence
  Antisense Oligo
uugaacacagcccugcagg

SEQ ID NO: 56451 - RNA, 19 nt, Artificial Sequence
  Sense Oligo
cugcagggcuguguucaaa

SEQ ID NO: 56452 - RNA, 19 nt, Artificial Sequence
  Antisense Oligo
uuugaacacagcccugcag

SEQ ID NO: 56453 - RNA, 19 nt, Artificial Sequence
  Sense Oligo
ugcagggcuguguucaaag

SEQ ID NO: 56454 - RNA, 19 nt, Artificial Sequence
  Antisense Oligo
cuuugaacacagcccugca

SEQ ID NO: 56455 - RNA, 19 nt, Artificial Sequence
  Sense Oligo
cagggcuguguucaaaguc

SEQ ID NO: 56456 - RNA, 19 nt, Artificial Sequence
  Antisense Oligo
gacuuugaacacagcccug

SEQ ID NO: 56457 - RNA, 19 nt, Artificial Sequence
  Sense Oligo
agggcuguguucaaagucu

SEQ ID NO: 56458 - RNA, 19 nt, Artificial Sequence
  Antisense Oligo
agacuuugaacacagcccu

SEQ ID NO: 56459 - RNA, 19 nt, Artificial Sequence
  Sense Oligo
gggcuguguucaaagucuc

SEQ ID NO: 56460 - RNA, 19 nt, Artificial Sequence
  Antisense Oligo
gagacuuugaacacagccc

SEQ ID NO: 56461 - RNA, 19 nt, Artificial Sequence
  Sense Oligo
uguguucaaagucucagua

SEQ ID NO: 56462 - RNA, 19 nt, Artificial Sequence
  Antisense Oligo
uacugagacuuugaacaca

SEQ ID NO: 56463 - RNA, 19 nt, Artificial Sequence
  Sense Oligo
guguucaaagucucaguau

SEQ ID NO: 56464 - RNA, 19 nt, Artificial Sequence
  Antisense Oligo
auacugagacuuugaacac

SEQ ID NO: 56465 - RNA, 19 nt, Artificial Sequence
  Sense Oligo
aaagucucaguauuuggag

SEQ ID NO: 56466 - RNA, 19 nt, Artificial Sequence
  Antisense Oligo
cuccaaauacugagacuuu

SEQ ID NO: 56467 - RNA, 19 nt, Artificial Sequence
  Sense Oligo
aagucucaguauuuggagg

SEQ ID NO: 56468 - RNA, 19 nt, Artificial Sequence
  Antisense Oligo
ccuccaaauacugagacuu

SEQ ID NO: 56469 - RNA, 19 nt, Artificial Sequence
  Sense Oligo
gucucaguauuuggaggga

SEQ ID NO: 56470 - RNA, 19 nt, Artificial Sequence
  Antisense Oligo
ucccuccaaauacugagac

SEQ ID NO: 56471 - RNA, 19 nt, Artificial Sequence
  Sense Oligo
aguauuuggagggauuuua

SEQ ID NO: 56472 - RNA, 19 nt, Artificial Sequence
  Antisense Oligo
uaaaaucccuccaaauacu

SEQ ID NO: 56473 - RNA, 19 nt, Artificial Sequence
  Sense Oligo
guauuuggagggauuuuau

SEQ ID NO: 56474 - RNA, 19 nt, Artificial Sequence
  Antisense Oligo
auaaaaucccuccaaauac

SEQ ID NO: 56475 - RNA, 19 nt, Artificial Sequence
  Sense Oligo
auuuggagggauuuuauug

SEQ ID NO: 56476 - RNA, 19 nt, Artificial Sequence
  Antisense Oligo
caauaaaaucccuccaaau

SEQ ID NO: 56477 - RNA, 19 nt, Artificial Sequence
  Sense Oligo
uuuggagggauuuuauuga

SEQ ID NO: 56478 - RNA, 19 nt, Artificial Sequence
  Antisense Oligo
ucaauaaaaucccuccaaa

SEQ ID NO: 56479 - RNA, 19 nt, Artificial Sequence
  Sense Oligo
uuggagggauuuuauugaa

SEQ ID NO: 56480 - RNA, 19 nt, Artificial Sequence
  Antisense Oligo
uucaauaaaaucccuccaa

SEQ ID NO: 56481 - RNA, 19 nt, Artificial Sequence
  Sense Oligo
ggagggauuuuauugaaua

SEQ ID NO: 56482 - RNA, 19 nt, Artificial Sequence
  Antisense Oligo
uauucaauaaaaucccucc

SEQ ID NO: 56483 - RNA, 19 nt, Artificial Sequence
  Sense Oligo
guucucaaccuuguuaugu

SEQ ID NO: 56484 - RNA, 19 nt, Artificial Sequence
  Antisense Oligo
acauaacaagguugagaac

SEQ ID NO: 56485 - RNA, 19 nt, Artificial Sequence
  Sense Oligo
uucucaaccuuguuaugug

SEQ ID NO: 56486 - RNA, 19 nt, Artificial Sequence
  Antisense Oligo
cacauaacaagguugagaa

SEQ ID NO: 56487 - RNA, 19 nt, Artificial Sequence
  Sense Oligo
ucucaaccuuguuaugugg

SEQ ID NO: 56488 - RNA, 19 nt, Artificial Sequence
  Antisense Oligo
ccacauaacaagguugaga

SEQ ID NO: 56489 - RNA, 19 nt, Artificial Sequence
  Sense Oligo
cucaaccuuguuaugugga

SEQ ID NO: 56490 - RNA, 19 nt, Artificial Sequence
  Antisense Oligo
uccacauaacaagguugag

SEQ ID NO: 56491 - RNA, 19 nt, Artificial Sequence
  Sense Oligo
ucaaccuuguuauguggag

SEQ ID NO: 56492 - RNA, 19 nt, Artificial Sequence
  Antisense Oligo
cuccacauaacaagguuga

SEQ ID NO: 56493 - RNA, 19 nt, Artificial Sequence
  Sense Oligo
caaccuuguuauguggagg

SEQ ID NO: 56494 - RNA, 19 nt, Artificial Sequence
  Antisense Oligo
ccuccacauaacaagguug

SEQ ID NO: 56495 - RNA, 19 nt, Artificial Sequence
  Sense Oligo
aaccuuguuauguggagga

SEQ ID NO: 56496 - RNA, 19 nt, Artificial Sequence
  Antisense Oligo
uccuccacauaacaagguu

SEQ ID NO: 56497 - RNA, 19 nt, Artificial Sequence
  Sense Oligo
cacauaaccaagcuguuua

SEQ ID NO: 56498 - RNA, 19 nt, Artificial Sequence
  Antisense Oligo
uaaacagcuugguuaugug

SEQ ID NO: 56499 - RNA, 19 nt, Artificial Sequence
  Sense Oligo
acauaaccaagcuguuuaa

SEQ ID NO: 56500 - RNA, 19 nt, Artificial Sequence
  Antisense Oligo
uuaaacagcuugguuaugu

SEQ ID NO: 56501 - RNA, 19 nt, Artificial Sequence
  Sense Oligo
cauaaccaagcuguuuaac

SEQ ID NO: 56502 - RNA, 19 nt, Artificial Sequence
  Antisense Oligo
guuaaacagcuugguuaug

SEQ ID NO: 56503 - RNA, 19 nt, Artificial Sequence
  Sense Oligo
auaaccaagcuguuuaacc

SEQ ID NO: 56504 - RNA, 19 nt, Artificial Sequence
  Antisense Oligo
gguuaaacagcuugguuau

SEQ ID NO: 56505 - RNA, 19 nt, Artificial Sequence
  Sense Oligo
uaaccaagcuguuuaaccc

SEQ ID NO: 56506 - RNA, 19 nt, Artificial Sequence
  Antisense Oligo
ggguuaaacagcuugguua

SEQ ID NO: 56507 - RNA, 19 nt, Artificial Sequence
  Sense Oligo
aaccaagcuguuuaaccca

SEQ ID NO: 56508 - RNA, 19 nt, Artificial Sequence
  Antisense Oligo
uggguuaaacagcuugguu

SEQ ID NO: 56509 - RNA, 19 nt, Artificial Sequence
  Sense Oligo
accaagcuguuuaacccaa

SEQ ID NO: 56510 - RNA, 19 nt, Artificial Sequence
  Antisense Oligo
uuggguuaaacagcuuggu

SEQ ID NO: 56511 - RNA, 19 nt, Artificial Sequence
  Sense Oligo
ccaagcuguuuaacccaaa

SEQ ID NO: 56512 - RNA, 19 nt, Artificial Sequence
  Antisense Oligo
uuuggguuaaacagcuugg

SEQ ID NO: 56513 - RNA, 19 nt, Artificial Sequence
  Sense Oligo
uguuuaacccaaagcuugu

SEQ ID NO: 56514 - RNA, 19 nt, Artificial Sequence
  Antisense Oligo
acaagcuuuggguuaaaca

SEQ ID NO: 56515 - RNA, 19 nt, Artificial Sequence
  Sense Oligo
guuuaacccaaagcuugua

SEQ ID NO: 56516 - RNA, 19 nt, Artificial Sequence
  Antisense Oligo
uacaagcuuuggguuaaac

SEQ ID NO: 56517 - RNA, 19 nt, Artificial Sequence
  Sense Oligo
uuuaacccaaagcuuguag

SEQ ID NO: 56518 - RNA, 19 nt, Artificial Sequence
  Antisense Oligo
cuacaagcuuuggguuaaa

SEQ ID NO: 56519 - RNA, 19 nt, Artificial Sequence
  Sense Oligo
uuaacccaaagcuuguaga

SEQ ID NO: 56520 - RNA, 19 nt, Artificial Sequence
  Antisense Oligo
ucuacaagcuuuggguuaa

SEQ ID NO: 56521 - RNA, 19 nt, Artificial Sequence
  Sense Oligo
uaacccaaagcuuguagaa

SEQ ID NO: 56522 - RNA, 19 nt, Artificial Sequence
  Antisense Oligo
uucuacaagcuuuggguua

SEQ ID NO: 56523 - RNA, 19 nt, Artificial Sequence
  Sense Oligo
aacccaaagcuuguagaau

SEQ ID NO: 56524 - RNA, 19 nt, Artificial Sequence
  Antisense Oligo
auucuacaagcuuuggguu

SEQ ID NO: 56525 - RNA, 19 nt, Artificial Sequence
  Sense Oligo
acccaaagcuuguagaauu

SEQ ID NO: 56526 - RNA, 19 nt, Artificial Sequence
  Antisense Oligo
aauucuacaagcuuugggu

SEQ ID NO: 56527 - RNA, 19 nt, Artificial Sequence
  Sense Oligo
cccaaagcuuguagaauua

SEQ ID NO: 56528 - RNA, 19 nt, Artificial Sequence
  Antisense Oligo
uaauucuacaagcuuuggg

SEQ ID NO: 56529 - RNA, 19 nt, Artificial Sequence
  Sense Oligo
ccaaagcuuguagaauuau

SEQ ID NO: 56530 - RNA, 19 nt, Artificial Sequence
  Antisense Oligo
auaauucuacaagcuuugg

SEQ ID NO: 56531 - RNA, 19 nt, Artificial Sequence
  Sense Oligo
auuaaugcuuacguaugug

SEQ ID NO: 56532 - RNA, 19 nt, Artificial Sequence
  Antisense Oligo
cacauacguaagcauuaau

SEQ ID NO: 56533 - RNA, 19 nt, Artificial Sequence
  Sense Oligo
uuaaugcuuacguaugugg

SEQ ID NO: 56534 - RNA, 19 nt, Artificial Sequence
  Antisense Oligo
ccacauacguaagcauuaa

SEQ ID NO: 56535 - RNA, 19 nt, Artificial Sequence
  Sense Oligo
uaaugcuuacguaugugga

SEQ ID NO: 56536 - RNA, 19 nt, Artificial Sequence
  Antisense Oligo
uccacauacguaagcauua

SEQ ID NO: 56537 - RNA, 19 nt, Artificial Sequence
  Sense Oligo
aaugcuuacguauguggau

SEQ ID NO: 56538 - RNA, 19 nt, Artificial Sequence
  Antisense Oligo
auccacauacguaagcauu

SEQ ID NO: 56539 - RNA, 19 nt, Artificial Sequence
  Sense Oligo
augcuuacguauguggaug

SEQ ID NO: 56540 - RNA, 19 nt, Artificial Sequence
  Antisense Oligo
cauccacauacguaagcau

SEQ ID NO: 56541 - RNA, 19 nt, Artificial Sequence
  Sense Oligo
uuacguauguggaugcugu

SEQ ID NO: 56542 - RNA, 19 nt, Artificial Sequence
  Antisense Oligo
acagcauccacauacguaa

SEQ ID NO: 56543 - RNA, 19 nt, Artificial Sequence
  Sense Oligo
uacguauguggaugcugug

SEQ ID NO: 56544 - RNA, 19 nt, Artificial Sequence
  Antisense Oligo
cacagcauccacauacgua

SEQ ID NO: 56545 - RNA, 19 nt, Artificial Sequence
  Sense Oligo
acguauguggaugcugugu

SEQ ID NO: 56546 - RNA, 19 nt, Artificial Sequence
  Antisense Oligo
acacagcauccacauacgu

SEQ ID NO: 56547 - RNA, 19 nt, Artificial Sequence
  Sense Oligo
cguauguggaugcuguguu

SEQ ID NO: 56548 - RNA, 19 nt, Artificial Sequence
  Antisense Oligo
aacacagcauccacauacg

SEQ ID NO: 56549 - RNA, 19 nt, Artificial Sequence
  Sense Oligo
guauguggaugcuguguuu

SEQ ID NO: 56550 - RNA, 19 nt, Artificial Sequence
  Antisense Oligo
aaacacagcauccacauac

SEQ ID NO: 56551 - RNA, 19 nt, Artificial Sequence
  Sense Oligo
uauguggaugcuguguuug

SEQ ID NO: 56552 - RNA, 19 nt, Artificial Sequence
  Antisense Oligo
caaacacagcauccacaua

SEQ ID NO: 56553 - RNA, 19 nt, Artificial Sequence
  Sense Oligo
auguggaugcuguguuugu

SEQ ID NO: 56554 - RNA, 19 nt, Artificial Sequence
  Antisense Oligo
acaaacacagcauccacau

SEQ ID NO: 56555 - RNA, 19 nt, Artificial Sequence
  Sense Oligo
uguggaugcuguguuugua

SEQ ID NO: 56556 - RNA, 19 nt, Artificial Sequence
  Antisense Oligo
uacaaacacagcauccaca

SEQ ID NO: 56557 - RNA, 19 nt, Artificial Sequence
  Sense Oligo
augcuguguuuguauaugc

SEQ ID NO: 56558 - RNA, 19 nt, Artificial Sequence
  Antisense Oligo
gcauauacaaacacagcau

SEQ ID NO: 56559 - RNA, 19 nt, Artificial Sequence
  Sense Oligo
ucuccauauuuaccuugau

SEQ ID NO: 56560 - RNA, 19 nt, Artificial Sequence
  Antisense Oligo
aucaagguaaauauggaga

SEQ ID NO: 56561 - RNA, 19 nt, Artificial Sequence
  Sense Oligo
cuccauauuuaccuugaua

SEQ ID NO: 56562 - RNA, 19 nt, Artificial Sequence
  Antisense Oligo
uaucaagguaaauauggag

SEQ ID NO: 56563 - RNA, 19 nt, Artificial Sequence
  Sense Oligo
uaccuugauauuugaugug

SEQ ID NO: 56564 - RNA, 19 nt, Artificial Sequence
  Antisense Oligo
cacaucaaauaucaaggua

SEQ ID NO: 56565 - RNA, 19 nt, Artificial Sequence
  Sense Oligo
accuugauauuugaugugu

SEQ ID NO: 56566 - RNA, 19 nt, Artificial Sequence
  Antisense Oligo
acacaucaaauaucaaggu

SEQ ID NO: 56567 - RNA, 19 nt, Artificial Sequence
  Sense Oligo
uugauguguauuugguguc

SEQ ID NO: 56568 - RNA, 19 nt, Artificial Sequence
  Antisense Oligo
gacaccaaauacacaucaa

SEQ ID NO: 56569 - RNA, 19 nt, Artificial Sequence
  Sense Oligo
gauguguauuuggugucag

SEQ ID NO: 56570 - RNA, 19 nt, Artificial Sequence
  Antisense Oligo
cugacaccaaauacacauc

SEQ ID NO: 56571 - RNA, 19 nt, Artificial Sequence
  Sense Oligo
auguguauuuggugucagu

SEQ ID NO: 56572 - RNA, 19 nt, Artificial Sequence
  Antisense Oligo
acugacaccaaauacacau

SEQ ID NO: 56573 - RNA, 19 nt, Artificial Sequence
  Sense Oligo
uguguauuuggugucagug

SEQ ID NO: 56574 - RNA, 19 nt, Artificial Sequence
  Antisense Oligo
cacugacaccaaauacaca

SEQ ID NO: 56575 - RNA, 19 nt, Artificial Sequence
  Sense Oligo
guguauuuggugucagugu

SEQ ID NO: 56576 - RNA, 19 nt, Artificial Sequence
  Antisense Oligo
acacugacaccaaauacac

SEQ ID NO: 56577 - RNA, 19 nt, Artificial Sequence
  Sense Oligo
uguauuuggugucagugua

SEQ ID NO: 56578 - RNA, 19 nt, Artificial Sequence
  Antisense Oligo
uacacugacaccaaauaca

SEQ ID NO: 56579 - RNA, 19 nt, Artificial Sequence
  Sense Oligo
guauuuggugucaguguau

SEQ ID NO: 56580 - RNA, 19 nt, Artificial Sequence
  Antisense Oligo
auacacugacaccaaauac

SEQ ID NO: 56581 - RNA, 19 nt, Artificial Sequence
  Sense Oligo
uauuuggugucaguguaug

SEQ ID NO: 56582 - RNA, 19 nt, Artificial Sequence
  Antisense Oligo
cauacacugacaccaaaua

SEQ ID NO: 56583 - RNA, 19 nt, Artificial Sequence
  Sense Oligo
auuuggugucaguguaugu

SEQ ID NO: 56584 - RNA, 19 nt, Artificial Sequence
  Antisense Oligo
acauacacugacaccaaau

SEQ ID NO: 56585 - RNA, 19 nt, Artificial Sequence
  Sense Oligo
uuuggugucaguguauguc

SEQ ID NO: 56586 - RNA, 19 nt, Artificial Sequence
  Antisense Oligo
gacauacacugacaccaaa

SEQ ID NO: 56587 - RNA, 19 nt, Artificial Sequence
  Sense Oligo
uuggugucaguguaugucu

SEQ ID NO: 56588 - RNA, 19 nt, Artificial Sequence
  Antisense Oligo
agacauacacugacaccaa

SEQ ID NO: 56589 - RNA, 19 nt, Artificial Sequence
  Sense Oligo
uggugucaguguaugucua

SEQ ID NO: 56590 - RNA, 19 nt, Artificial Sequence
  Antisense Oligo
uagacauacacugacacca

SEQ ID NO: 56591 - RNA, 19 nt, Artificial Sequence
  Sense Oligo
ggugucaguguaugucuaa

SEQ ID NO: 56592 - RNA, 19 nt, Artificial Sequence
  Antisense Oligo
uuagacauacacugacacc

SEQ ID NO: 56593 - RNA, 19 nt, Artificial Sequence
  Sense Oligo
gugucaguguaugucuaag

SEQ ID NO: 56594 - RNA, 19 nt, Artificial Sequence
  Antisense Oligo
cuuagacauacacugacac

SEQ ID NO: 56595 - RNA, 19 nt, Artificial Sequence
  Sense Oligo
ugucaguguaugucuaaga

SEQ ID NO: 56596 - RNA, 19 nt, Artificial Sequence
  Antisense Oligo
ucuuagacauacacugaca

SEQ ID NO: 56597 - RNA, 19 nt, Artificial Sequence
  Sense Oligo
gucaguguaugucuaagag

SEQ ID NO: 56598 - RNA, 19 nt, Artificial Sequence
  Antisense Oligo
cucuuagacauacacugac

SEQ ID NO: 56599 - RNA, 19 nt, Artificial Sequence
  Sense Oligo
ucaguguaugucuaagagc

SEQ ID NO: 56600 - RNA, 19 nt, Artificial Sequence
  Antisense Oligo
gcucuuagacauacacuga

SEQ ID NO: 56601 - RNA, 19 nt, Artificial Sequence
  Sense Oligo
caguguaugucuaagagca

SEQ ID NO: 56602 - RNA, 19 nt, Artificial Sequence
  Antisense Oligo
ugcucuuagacauacacug

SEQ ID NO: 56603 - RNA, 19 nt, Artificial Sequence
  Sense Oligo
aguguaugucuaagagcaa

SEQ ID NO: 56604 - RNA, 19 nt, Artificial Sequence
  Antisense Oligo
uugcucuuagacauacacu

SEQ ID NO: 56605 - RNA, 19 nt, Artificial Sequence
  Sense Oligo
guguaugucuaagagcaau

SEQ ID NO: 56606 - RNA, 19 nt, Artificial Sequence
  Antisense Oligo
auugcucuuagacauacac

SEQ ID NO: 56607 - RNA, 19 nt, Artificial Sequence
  Sense Oligo
uguaugucuaagagcaauu

SEQ ID NO: 56608 - RNA, 19 nt, Artificial Sequence
  Antisense Oligo
aauugcucuuagacauaca

SEQ ID NO: 56609 - RNA, 19 nt, Artificial Sequence
  Sense Oligo
uuuuccugucagcaaugug

SEQ ID NO: 56610 - RNA, 19 nt, Artificial Sequence
  Antisense Oligo
cacauugcugacaggaaaa

SEQ ID NO: 56611 - RNA, 19 nt, Artificial Sequence
  Sense Oligo
cugugagcaaauucauugg

SEQ ID NO: 56612 - RNA, 19 nt, Artificial Sequence
  Antisense Oligo
ccaaugaauuugcucacag

SEQ ID NO: 56613 - RNA, 19 nt, Artificial Sequence
  Sense Oligo
ugugagcaaauucauuggc

SEQ ID NO: 56614 - RNA, 19 nt, Artificial Sequence
  Antisense Oligo
gccaaugaauuugcucaca

SEQ ID NO: 56615 - RNA, 19 nt, Artificial Sequence
  Sense Oligo
gugagcaaauucauuggcg

SEQ ID NO: 56616 - RNA, 19 nt, Artificial Sequence
  Antisense Oligo
cgccaaugaauuugcucac

SEQ ID NO: 56617 - RNA, 19 nt, Artificial Sequence
  Sense Oligo
ugagcaaauucauuggcga

SEQ ID NO: 56618 - RNA, 19 nt, Artificial Sequence
  Antisense Oligo
ucgccaaugaauuugcuca

SEQ ID NO: 56619 - RNA, 19 nt, Artificial Sequence
  Sense Oligo
gagcaaauucauuggcgaa

SEQ ID NO: 56620 - RNA, 19 nt, Artificial Sequence
  Antisense Oligo
uucgccaaugaauuugcuc

SEQ ID NO: 56621 - RNA, 19 nt, Artificial Sequence
  Sense Oligo
auuggcgaaugcaagaucc

SEQ ID NO: 56622 - RNA, 19 nt, Artificial Sequence
  Antisense Oligo
ggaucuugcauucgccaau

SEQ ID NO: 56623 - RNA, 19 nt, Artificial Sequence
  Sense Oligo
uuggcgaaugcaagauccu

SEQ ID NO: 56624 - RNA, 19 nt, Artificial Sequence
  Antisense Oligo
aggaucuugcauucgccaa

SEQ ID NO: 56625 - RNA, 19 nt, Artificial Sequence
  Sense Oligo
uggcgaaugcaagauccuu

SEQ ID NO: 56626 - RNA, 19 nt, Artificial Sequence
  Antisense Oligo
aaggaucuugcauucgcca

SEQ ID NO: 56627 - RNA, 19 nt, Artificial Sequence
  Sense Oligo
ggcgaaugcaagauccuuu

SEQ ID NO: 56628 - RNA, 19 nt, Artificial Sequence
  Antisense Oligo
aaaggaucuugcauucgcc

SEQ ID NO: 56629 - RNA, 19 nt, Artificial Sequence
  Sense Oligo
augcaagauccuuucaccu

SEQ ID NO: 56630 - RNA, 19 nt, Artificial Sequence
  Antisense Oligo
aggugaaaggaucuugcau

SEQ ID NO: 56631 - RNA, 19 nt, Artificial Sequence
  Sense Oligo
ugcaagauccuuucaccuc

SEQ ID NO: 56632 - RNA, 19 nt, Artificial Sequence
  Antisense Oligo
gaggugaaaggaucuugca

SEQ ID NO: 56633 - RNA, 19 nt, Artificial Sequence
  Sense Oligo
gauccuuucaccuccugau

SEQ ID NO: 56634 - RNA, 19 nt, Artificial Sequence
  Antisense Oligo
aucaggaggugaaaggauc

SEQ ID NO: 56635 - RNA, 19 nt, Artificial Sequence
  Sense Oligo
uucaccuccugauaucagc

SEQ ID NO: 56636 - RNA, 19 nt, Artificial Sequence
  Antisense Oligo
gcugauaucaggaggugaa

SEQ ID NO: 56637 - RNA, 19 nt, Artificial Sequence
  Sense Oligo
ucaccuccugauaucagcc

SEQ ID NO: 56638 - RNA, 19 nt, Artificial Sequence
  Antisense Oligo
ggcugauaucaggagguga

SEQ ID NO: 56639 - RNA, 19 nt, Artificial Sequence
  Sense Oligo
caccuccugauaucagccg

SEQ ID NO: 56640 - RNA, 19 nt, Artificial Sequence
  Antisense Oligo
cggcugauaucaggaggug

SEQ ID NO: 56641 - RNA, 19 nt, Artificial Sequence
  Sense Oligo
accuccugauaucagccgu

SEQ ID NO: 56642 - RNA, 19 nt, Artificial Sequence
  Antisense Oligo
acggcugauaucaggaggu

SEQ ID NO: 56643 - RNA, 19 nt, Artificial Sequence
  Sense Oligo
ccuccugauaucagccguu

SEQ ID NO: 56644 - RNA, 19 nt, Artificial Sequence
  Antisense Oligo
aacggcugauaucaggagg

SEQ ID NO: 56645 - RNA, 19 nt, Artificial Sequence
  Sense Oligo
cuccugauaucagccguuu

SEQ ID NO: 56646 - RNA, 19 nt, Artificial Sequence
  Antisense Oligo
aaacggcugauaucaggag

SEQ ID NO: 56647 - RNA, 19 nt, Artificial Sequence
  Sense Oligo
uccugauaucagccguuuu

SEQ ID NO: 56648 - RNA, 19 nt, Artificial Sequence
  Antisense Oligo
aaaacggcugauaucagga

SEQ ID NO: 56649 - RNA, 19 nt, Artificial Sequence
  Sense Oligo
ccugauaucagccguuuug

SEQ ID NO: 56650 - RNA, 19 nt, Artificial Sequence
  Antisense Oligo
caaaacggcugauaucagg

SEQ ID NO: 56651 - RNA, 19 nt, Artificial Sequence
  Sense Oligo
cugauaucagccguuuugc

SEQ ID NO: 56652 - RNA, 19 nt, Artificial Sequence
  Antisense Oligo
gcaaaacggcugauaucag

SEQ ID NO: 56653 - RNA, 19 nt, Artificial Sequence
  Sense Oligo
ugauaucagccguuuugca

SEQ ID NO: 56654 - RNA, 19 nt, Artificial Sequence
  Antisense Oligo
ugcaaaacggcugauauca

SEQ ID NO: 56655 - RNA, 19 nt, Artificial Sequence
  Sense Oligo
gauaucagccguuuugcaa

SEQ ID NO: 56656 - RNA, 19 nt, Artificial Sequence
  Antisense Oligo
uugcaaaacggcugauauc

SEQ ID NO: 56657 - RNA, 19 nt, Artificial Sequence
  Sense Oligo
auaucagccguuuugcaac

SEQ ID NO: 56658 - RNA, 19 nt, Artificial Sequence
  Antisense Oligo
guugcaaaacggcugauau

SEQ ID NO: 56659 - RNA, 19 nt, Artificial Sequence
  Sense Oligo
ucugugccauuguugaggg

SEQ ID NO: 56660 - RNA, 19 nt, Artificial Sequence
  Antisense Oligo
cccucaacaauggcacaga

SEQ ID NO: 56661 - RNA, 19 nt, Artificial Sequence
  Sense Oligo
cugugccauuguugagggc

SEQ ID NO: 56662 - RNA, 19 nt, Artificial Sequence
  Antisense Oligo
gcccucaacaauggcacag

SEQ ID NO: 56663 - RNA, 19 nt, Artificial Sequence
  Sense Oligo
cauucaugcugcagccguc

SEQ ID NO: 56664 - RNA, 19 nt, Artificial Sequence
  Antisense Oligo
gacggcugcagcaugaaug

SEQ ID NO: 56665 - RNA, 19 nt, Artificial Sequence
  Sense Oligo
caugcugcagccguccuuc

SEQ ID NO: 56666 - RNA, 19 nt, Artificial Sequence
  Antisense Oligo
gaaggacggcugcagcaug

SEQ ID NO: 56667 - RNA, 19 nt, Artificial Sequence
  Sense Oligo
augcugcagccguccuucu

SEQ ID NO: 56668 - RNA, 19 nt, Artificial Sequence
  Antisense Oligo
agaaggacggcugcagcau

SEQ ID NO: 56669 - RNA, 19 nt, Artificial Sequence
  Sense Oligo
ugcugcagccguccuucug

SEQ ID NO: 56670 - RNA, 19 nt, Artificial Sequence
  Antisense Oligo
cagaaggacggcugcagca

SEQ ID NO: 56671 - RNA, 19 nt, Artificial Sequence
  Sense Oligo
gcugcagccguccuucugu

SEQ ID NO: 56672 - RNA, 19 nt, Artificial Sequence
  Antisense Oligo
acagaaggacggcugcagc

SEQ ID NO: 56673 - RNA, 19 nt, Artificial Sequence
  Sense Oligo
cugcagccguccuucugug

SEQ ID NO: 56674 - RNA, 19 nt, Artificial Sequence
  Antisense Oligo
cacagaaggacggcugcag

SEQ ID NO: 56675 - RNA, 19 nt, Artificial Sequence
  Sense Oligo
ugcagccguccuucugugu

SEQ ID NO: 56676 - RNA, 19 nt, Artificial Sequence
  Antisense Oligo
acacagaaggacggcugca

SEQ ID NO: 56677 - RNA, 19 nt, Artificial Sequence
  Sense Oligo
gcagccguccuucugugug

SEQ ID NO: 56678 - RNA, 19 nt, Artificial Sequence
  Antisense Oligo
cacacagaaggacggcugc

SEQ ID NO: 56679 - RNA, 19 nt, Artificial Sequence
  Sense Oligo
cagccguccuucugugugg

SEQ ID NO: 56680 - RNA, 19 nt, Artificial Sequence
  Antisense Oligo
ccacacagaaggacggcug

SEQ ID NO: 56681 - RNA, 19 nt, Artificial Sequence
  Sense Oligo
agccguccuucugugugga

SEQ ID NO: 56682 - RNA, 19 nt, Artificial Sequence
  Antisense Oligo
uccacacagaaggacggcu

SEQ ID NO: 56683 - RNA, 19 nt, Artificial Sequence
  Sense Oligo
cccuaaagaaucuggccuu

SEQ ID NO: 56684 - RNA, 19 nt, Artificial Sequence
  Antisense Oligo
aaggccagauucuuuaggg

SEQ ID NO: 56685 - RNA, 19 nt, Artificial Sequence
  Sense Oligo
ccuaaagaaucuggccuuc

SEQ ID NO: 56686 - RNA, 19 nt, Artificial Sequence
  Antisense Oligo
gaaggccagauucuuuagg

SEQ ID NO: 56687 - RNA, 19 nt, Artificial Sequence
  Sense Oligo
ccaccauggcgguaagagu

SEQ ID NO: 56688 - RNA, 19 nt, Artificial Sequence
  Antisense Oligo
acucuuaccgccauggugg

SEQ ID NO: 56689 - RNA, 19 nt, Artificial Sequence
  Sense Oligo
caccauggcgguaagagua

SEQ ID NO: 56690 - RNA, 19 nt, Artificial Sequence
  Antisense Oligo
uacucuuaccgccauggug

SEQ ID NO: 56691 - RNA, 19 nt, Artificial Sequence
  Sense Oligo
accauggcgguaagaguag

SEQ ID NO: 56692 - RNA, 19 nt, Artificial Sequence
  Antisense Oligo
cuacucuuaccgccauggu

SEQ ID NO: 56693 - RNA, 19 nt, Artificial Sequence
  Sense Oligo
ccauggcgguaagaguagg

SEQ ID NO: 56694 - RNA, 19 nt, Artificial Sequence
  Antisense Oligo
ccuacucuuaccgccaugg

SEQ ID NO: 56695 - RNA, 19 nt, Artificial Sequence
  Sense Oligo
cauggcgguaagaguaggc

SEQ ID NO: 56696 - RNA, 19 nt, Artificial Sequence
  Antisense Oligo
gccuacucuuaccgccaug

SEQ ID NO: 56697 - RNA, 19 nt, Artificial Sequence
  Sense Oligo
auggcgguaagaguaggcc

SEQ ID NO: 56698 - RNA, 19 nt, Artificial Sequence
  Antisense Oligo
ggccuacucuuaccgccau

SEQ ID NO: 56699 - RNA, 19 nt, Artificial Sequence
  Sense Oligo
ggcgguaagaguaggccac

SEQ ID NO: 56700 - RNA, 19 nt, Artificial Sequence
  Antisense Oligo
guggccuacucuuaccgcc

SEQ ID NO: 56701 - RNA, 19 nt, Artificial Sequence
  Sense Oligo
gcgguaagaguaggccaca

SEQ ID NO: 56702 - RNA, 19 nt, Artificial Sequence
  Antisense Oligo
uguggccuacucuuaccgc

SEQ ID NO: 56703 - RNA, 19 nt, Artificial Sequence
  Sense Oligo
caauuccaucggccuucac

SEQ ID NO: 56704 - RNA, 19 nt, Artificial Sequence
  Antisense Oligo
gugaaggccgauggaauug

SEQ ID NO: 56705 - RNA, 19 nt, Artificial Sequence
  Sense Oligo
aauuccaucggccuucacu

SEQ ID NO: 56706 - RNA, 19 nt, Artificial Sequence
  Antisense Oligo
agugaaggccgauggaauu

SEQ ID NO: 56707 - RNA, 19 nt, Artificial Sequence
  Sense Oligo
auuccaucggccuucacug

SEQ ID NO: 56708 - RNA, 19 nt, Artificial Sequence
  Antisense Oligo
cagugaaggccgauggaau

SEQ ID NO: 56709 - RNA, 19 nt, Artificial Sequence
  Sense Oligo
cccagagcuugucacugua

SEQ ID NO: 56710 - RNA, 19 nt, Artificial Sequence
  Antisense Oligo
uacagugacaagcucuggg

SEQ ID NO: 56711 - RNA, 19 nt, Artificial Sequence
  Sense Oligo
agaccgagcugcagcugug

SEQ ID NO: 56712 - RNA, 19 nt, Artificial Sequence
  Antisense Oligo
cacagcugcagcucggucu

SEQ ID NO: 56713 - RNA, 19 nt, Artificial Sequence
  Sense Oligo
ucuugagcaucuuuaucuc

SEQ ID NO: 56714 - RNA, 19 nt, Artificial Sequence
  Antisense Oligo
gagauaaagaugcucaaga

SEQ ID NO: 56715 - RNA, 19 nt, Artificial Sequence
  Sense Oligo
cuugagcaucuuuaucucc

SEQ ID NO: 56716 - RNA, 19 nt, Artificial Sequence
  Antisense Oligo
ggagauaaagaugcucaag

SEQ ID NO: 56717 - RNA, 19 nt, Artificial Sequence
  Sense Oligo
ugagcaucuuuaucuccuc

SEQ ID NO: 56718 - RNA, 19 nt, Artificial Sequence
  Antisense Oligo
gaggagauaaagaugcuca

SEQ ID NO: 56719 - RNA, 19 nt, Artificial Sequence
  Sense Oligo
caucuuuaucuccucaguu

SEQ ID NO: 56720 - RNA, 19 nt, Artificial Sequence
  Antisense Oligo
aacugaggagauaaagaug

SEQ ID NO: 56721 - RNA, 19 nt, Artificial Sequence
  Sense Oligo
aucuuuaucuccucaguuc

SEQ ID NO: 56722 - RNA, 19 nt, Artificial Sequence
  Antisense Oligo
gaacugaggagauaaagau

SEQ ID NO: 56723 - RNA, 19 nt, Artificial Sequence
  Sense Oligo
cucaguucucugccuuugu

SEQ ID NO: 56724 - RNA, 19 nt, Artificial Sequence
  Antisense Oligo
acaaaggcagagaacugag

SEQ ID NO: 56725 - RNA, 19 nt, Artificial Sequence
  Sense Oligo
ucaguucucugccuuugug

SEQ ID NO: 56726 - RNA, 19 nt, Artificial Sequence
  Antisense Oligo
cacaaaggcagagaacuga

SEQ ID NO: 56727 - RNA, 19 nt, Artificial Sequence
  Sense Oligo
caguucucugccuuugugu

SEQ ID NO: 56728 - RNA, 19 nt, Artificial Sequence
  Antisense Oligo
acacaaaggcagagaacug

SEQ ID NO: 56729 - RNA, 19 nt, Artificial Sequence
  Sense Oligo
gccuuugugucaccugauu

SEQ ID NO: 56730 - RNA, 19 nt, Artificial Sequence
  Antisense Oligo
aaucaggugacacaaaggc

SEQ ID NO: 56731 - RNA, 19 nt, Artificial Sequence
  Sense Oligo
uugugucaccugauucuug

SEQ ID NO: 56732 - RNA, 19 nt, Artificial Sequence
  Antisense Oligo
caagaaucaggugacacaa

SEQ ID NO: 56733 - RNA, 19 nt, Artificial Sequence
  Sense Oligo
ugugucaccugauucuuga

SEQ ID NO: 56734 - RNA, 19 nt, Artificial Sequence
  Antisense Oligo
ucaagaaucaggugacaca

SEQ ID NO: 56735 - RNA, 19 nt, Artificial Sequence
  Sense Oligo
gugucaccugauucuugag

SEQ ID NO: 56736 - RNA, 19 nt, Artificial Sequence
  Antisense Oligo
cucaagaaucaggugacac

SEQ ID NO: 56737 - RNA, 19 nt, Artificial Sequence
  Sense Oligo
ugucaccugauucuugagc

SEQ ID NO: 56738 - RNA, 19 nt, Artificial Sequence
  Antisense Oligo
gcucaagaaucaggugaca

SEQ ID NO: 56739 - RNA, 19 nt, Artificial Sequence
  Sense Oligo
gucaccugauucuugagca

SEQ ID NO: 56740 - RNA, 19 nt, Artificial Sequence
  Antisense Oligo
ugcucaagaaucaggugac

SEQ ID NO: 56741 - RNA, 19 nt, Artificial Sequence
  Sense Oligo
ucaccugauucuugagcac

SEQ ID NO: 56742 - RNA, 19 nt, Artificial Sequence
  Antisense Oligo
gugcucaagaaucagguga

SEQ ID NO: 56743 - RNA, 19 nt, Artificial Sequence
  Sense Oligo
acagacuugccuugcccuu

SEQ ID NO: 56744 - RNA, 19 nt, Artificial Sequence
  Antisense Oligo
aagggcaaggcaagucugu

SEQ ID NO: 56745 - RNA, 19 nt, Artificial Sequence
  Sense Oligo
cagacuugccuugcccuuu

SEQ ID NO: 56746 - RNA, 19 nt, Artificial Sequence
  Antisense Oligo
aaagggcaaggcaagucug

SEQ ID NO: 56747 - RNA, 19 nt, Artificial Sequence
  Sense Oligo
agacuugccuugcccuuug

SEQ ID NO: 56748 - RNA, 19 nt, Artificial Sequence
  Antisense Oligo
caaagggcaaggcaagucu

SEQ ID NO: 56749 - RNA, 19 nt, Artificial Sequence
  Sense Oligo
gacuugccuugcccuuugu

SEQ ID NO: 56750 - RNA, 19 nt, Artificial Sequence
  Antisense Oligo
acaaagggcaaggcaaguc

SEQ ID NO: 56751 - RNA, 19 nt, Artificial Sequence
  Sense Oligo
ugccuugcccuuuguuauu

SEQ ID NO: 56752 - RNA, 19 nt, Artificial Sequence
  Antisense Oligo
aauaacaaagggcaaggca

SEQ ID NO: 56753 - RNA, 19 nt, Artificial Sequence
  Sense Oligo
gccuugcccuuuguuauuu

SEQ ID NO: 56754 - RNA, 19 nt, Artificial Sequence
  Antisense Oligo
aaauaacaaagggcaaggc

SEQ ID NO: 56755 - RNA, 19 nt, Artificial Sequence
  Sense Oligo
ccuugcccuuuguuauuuc

SEQ ID NO: 56756 - RNA, 19 nt, Artificial Sequence
  Antisense Oligo
gaaauaacaaagggcaagg

SEQ ID NO: 56757 - RNA, 19 nt, Artificial Sequence
  Sense Oligo
gcccuuuguuauuucacag

SEQ ID NO: 56758 - RNA, 19 nt, Artificial Sequence
  Antisense Oligo
cugugaaauaacaaagggc

SEQ ID NO: 56759 - RNA, 19 nt, Artificial Sequence
  Sense Oligo
cccuuuguuauuucacagg

SEQ ID NO: 56760 - RNA, 19 nt, Artificial Sequence
  Antisense Oligo
ccugugaaauaacaaaggg

SEQ ID NO: 56761 - RNA, 19 nt, Artificial Sequence
  Sense Oligo
ccuuuguuauuucacagga

SEQ ID NO: 56762 - RNA, 19 nt, Artificial Sequence
  Antisense Oligo
uccugugaaauaacaaagg

SEQ ID NO: 56763 - RNA, 19 nt, Artificial Sequence
  Sense Oligo
cuuuguuauuucacaggaa

SEQ ID NO: 56764 - RNA, 19 nt, Artificial Sequence
  Antisense Oligo
uuccugugaaauaacaaag

SEQ ID NO: 56765 - RNA, 19 nt, Artificial Sequence
  Sense Oligo
uuuguuauuucacaggaag

SEQ ID NO: 56766 - RNA, 19 nt, Artificial Sequence
  Antisense Oligo
cuuccugugaaauaacaaa

SEQ ID NO: 56767 - RNA, 19 nt, Artificial Sequence
  Sense Oligo
uuguuauuucacaggaagc

SEQ ID NO: 56768 - RNA, 19 nt, Artificial Sequence
  Antisense Oligo
gcuuccugugaaauaacaa

SEQ ID NO: 56769 - RNA, 19 nt, Artificial Sequence
  Sense Oligo
uguuauuucacaggaagcu

SEQ ID NO: 56770 - RNA, 19 nt, Artificial Sequence
  Antisense Oligo
agcuuccugugaaauaaca

SEQ ID NO: 56771 - RNA, 19 nt, Artificial Sequence
  Sense Oligo
guuauuucacaggaagcug

SEQ ID NO: 56772 - RNA, 19 nt, Artificial Sequence
  Antisense Oligo
cagcuuccugugaaauaac

SEQ ID NO: 56773 - RNA, 19 nt, Artificial Sequence
  Sense Oligo
caggaagcuguucuguuuu

SEQ ID NO: 56774 - RNA, 19 nt, Artificial Sequence
  Antisense Oligo
aaaacagaacagcuuccug

SEQ ID NO: 56775 - RNA, 19 nt, Artificial Sequence
  Sense Oligo
aggaagcuguucuguuuuc

SEQ ID NO: 56776 - RNA, 19 nt, Artificial Sequence
  Antisense Oligo
gaaaacagaacagcuuccu

SEQ ID NO: 56777 - RNA, 19 nt, Artificial Sequence
  Sense Oligo
gaagcuguucuguuuucuu

SEQ ID NO: 56778 - RNA, 19 nt, Artificial Sequence
  Antisense Oligo
aagaaaacagaacagcuuc

SEQ ID NO: 56779 - RNA, 19 nt, Artificial Sequence
  Sense Oligo
uguuuucuucacagacagc

SEQ ID NO: 56780 - RNA, 19 nt, Artificial Sequence
  Antisense Oligo
gcugucugugaagaaaaca

SEQ ID NO: 56781 - RNA, 19 nt, Artificial Sequence
  Sense Oligo
guuuucuucacagacagcu

SEQ ID NO: 56782 - RNA, 19 nt, Artificial Sequence
  Antisense Oligo
agcugucugugaagaaaac

SEQ ID NO: 56783 - RNA, 19 nt, Artificial Sequence
  Sense Oligo
uuuucuucacagacagcuu

SEQ ID NO: 56784 - RNA, 19 nt, Artificial Sequence
  Antisense Oligo
aagcugucugugaagaaaa

SEQ ID NO: 56785 - RNA, 19 nt, Artificial Sequence
  Sense Oligo
uuucuucacagacagcuug

SEQ ID NO: 56786 - RNA, 19 nt, Artificial Sequence
  Antisense Oligo
caagcugucugugaagaaa

SEQ ID NO: 56787 - RNA, 19 nt, Artificial Sequence
  Sense Oligo
uucuucacagacagcuuga

SEQ ID NO: 56788 - RNA, 19 nt, Artificial Sequence
  Antisense Oligo
ucaagcugucugugaagaa

SEQ ID NO: 56789 - RNA, 19 nt, Artificial Sequence
  Sense Oligo
ucuucacagacagcuugag

SEQ ID NO: 56790 - RNA, 19 nt, Artificial Sequence
  Antisense Oligo
cucaagcugucugugaaga

SEQ ID NO: 56791 - RNA, 19 nt, Artificial Sequence
  Sense Oligo
agcagaguucccuuucuuc

SEQ ID NO: 56792 - RNA, 19 nt, Artificial Sequence
  Antisense Oligo
gaagaaagggaacucugcu

SEQ ID NO: 56793 - RNA, 19 nt, Artificial Sequence
  Sense Oligo
gaguucccuuucuuccucu

SEQ ID NO: 56794 - RNA, 19 nt, Artificial Sequence
  Antisense Oligo
agaggaagaaagggaacuc

SEQ ID NO: 56795 - RNA, 19 nt, Artificial Sequence
  Sense Oligo
cccuuucuuccucuaggcc

SEQ ID NO: 56796 - RNA, 19 nt, Artificial Sequence
  Antisense Oligo
ggccuagaggaagaaaggg

SEQ ID NO: 56797 - RNA, 19 nt, Artificial Sequence
  Sense Oligo
ccuuucuuccucuaggccu

SEQ ID NO: 56798 - RNA, 19 nt, Artificial Sequence
  Antisense Oligo
aggccuagaggaagaaagg

SEQ ID NO: 56799 - RNA, 19 nt, Artificial Sequence
  Sense Oligo
ucuaggccuccugcugagc

SEQ ID NO: 56800 - RNA, 19 nt, Artificial Sequence
  Antisense Oligo
gcucagcaggaggccuaga

SEQ ID NO: 56801 - RNA, 19 nt, Artificial Sequence
  Sense Oligo
ugagcagcagcacccaggu

SEQ ID NO: 56802 - RNA, 19 nt, Artificial Sequence
  Antisense Oligo
accugggugcugcugcuca

SEQ ID NO: 56803 - RNA, 19 nt, Artificial Sequence
  Sense Oligo
agcagcagcacccagguga

SEQ ID NO: 56804 - RNA, 19 nt, Artificial Sequence
  Antisense Oligo
ucaccugggugcugcugcu

SEQ ID NO: 56805 - RNA, 19 nt, Artificial Sequence
  Sense Oligo
cagcagcacccaggugaca

SEQ ID NO: 56806 - RNA, 19 nt, Artificial Sequence
  Antisense Oligo
ugucaccugggugcugcug

SEQ ID NO: 56807 - RNA, 19 nt, Artificial Sequence
  Sense Oligo
caagcucacuuaucuagag

SEQ ID NO: 56808 - RNA, 19 nt, Artificial Sequence
  Antisense Oligo
cucuagauaagugagcuug

SEQ ID NO: 56809 - RNA, 19 nt, Artificial Sequence
  Sense Oligo
cucacuuaucuagagcugu

SEQ ID NO: 56810 - RNA, 19 nt, Artificial Sequence
  Antisense Oligo
acagcucuagauaagugag

SEQ ID NO: 56811 - RNA, 19 nt, Artificial Sequence
  Sense Oligo
ucacuuaucuagagcuguc

SEQ ID NO: 56812 - RNA, 19 nt, Artificial Sequence
  Antisense Oligo
gacagcucuagauaaguga

SEQ ID NO: 56813 - RNA, 19 nt, Artificial Sequence
  Sense Oligo
cacuuaucuagagcugucu

SEQ ID NO: 56814 - RNA, 19 nt, Artificial Sequence
  Antisense Oligo
agacagcucuagauaagug

SEQ ID NO: 56815 - RNA, 19 nt, Artificial Sequence
  Sense Oligo
acuuaucuagagcugucuc

SEQ ID NO: 56816 - RNA, 19 nt, Artificial Sequence
  Antisense Oligo
gagacagcucuagauaagu

SEQ ID NO: 56817 - RNA, 19 nt, Artificial Sequence
  Sense Oligo
gagcugucucugucuucuu

SEQ ID NO: 56818 - RNA, 19 nt, Artificial Sequence
  Antisense Oligo
aagaagacagagacagcuc

SEQ ID NO: 56819 - RNA, 19 nt, Artificial Sequence
  Sense Oligo
gcugucucugucuucuugu

SEQ ID NO: 56820 - RNA, 19 nt, Artificial Sequence
  Antisense Oligo
acaagaagacagagacagc

SEQ ID NO: 56821 - RNA, 19 nt, Artificial Sequence
  Sense Oligo
cugucucugucuucuuguu

SEQ ID NO: 56822 - RNA, 19 nt, Artificial Sequence
  Antisense Oligo
aacaagaagacagagacag

SEQ ID NO: 56823 - RNA, 19 nt, Artificial Sequence
  Sense Oligo
ugucucugucuucuuguuu

SEQ ID NO: 56824 - RNA, 19 nt, Artificial Sequence
  Antisense Oligo
aaacaagaagacagagaca

SEQ ID NO: 56825 - RNA, 19 nt, Artificial Sequence
  Sense Oligo
uuucagcaugcuuuucuuc

SEQ ID NO: 56826 - RNA, 19 nt, Artificial Sequence
  Antisense Oligo
gaagaaaagcaugcugaaa

SEQ ID NO: 56827 - RNA, 19 nt, Artificial Sequence
  Sense Oligo
agcaugcuuuucuuccaac

SEQ ID NO: 56828 - RNA, 19 nt, Artificial Sequence
  Antisense Oligo
guuggaagaaaagcaugcu

SEQ ID NO: 56829 - RNA, 19 nt, Artificial Sequence
  Sense Oligo
uuuucuuccaaccaugccu

SEQ ID NO: 56830 - RNA, 19 nt, Artificial Sequence
  Antisense Oligo
aggcaugguuggaagaaaa

SEQ ID NO: 56831 - RNA, 19 nt, Artificial Sequence
  Sense Oligo
uuucuuccaaccaugccug

SEQ ID NO: 56832 - RNA, 19 nt, Artificial Sequence
  Antisense Oligo
caggcaugguuggaagaaa

SEQ ID NO: 56833 - RNA, 19 nt, Artificial Sequence
  Sense Oligo
uuccaaccaugccugaaga

SEQ ID NO: 56834 - RNA, 19 nt, Artificial Sequence
  Antisense Oligo
ucuucaggcaugguuggaa

SEQ ID NO: 56835 - RNA, 19 nt, Artificial Sequence
  Sense Oligo
caaccaugccugaagacuu

SEQ ID NO: 56836 - RNA, 19 nt, Artificial Sequence
  Antisense Oligo
aagucuucaggcaugguug

SEQ ID NO: 56837 - RNA, 19 nt, Artificial Sequence
  Sense Oligo
ccugaagacuugcuggcuc

SEQ ID NO: 56838 - RNA, 19 nt, Artificial Sequence
  Antisense Oligo
gagccagcaagucuucagg

SEQ ID NO: 56839 - RNA, 19 nt, Artificial Sequence
  Sense Oligo
cugaagacuugcuggcuca

SEQ ID NO: 56840 - RNA, 19 nt, Artificial Sequence
  Antisense Oligo
ugagccagcaagucuucag

SEQ ID NO: 56841 - RNA, 19 nt, Artificial Sequence
  Sense Oligo
ugaagacuugcuggcucaa

SEQ ID NO: 56842 - RNA, 19 nt, Artificial Sequence
  Antisense Oligo
uugagccagcaagucuuca

SEQ ID NO: 56843 - RNA, 19 nt, Artificial Sequence
  Sense Oligo
uugcuggcucaagcucgga

SEQ ID NO: 56844 - RNA, 19 nt, Artificial Sequence
  Antisense Oligo
uccgagcuugagccagcaa

SEQ ID NO: 56845 - RNA, 19 nt, Artificial Sequence
  Sense Oligo
ugcuggcucaagcucggag

SEQ ID NO: 56846 - RNA, 19 nt, Artificial Sequence
  Antisense Oligo
cuccgagcuugagccagca

SEQ ID NO: 56847 - RNA, 19 nt, Artificial Sequence
  Sense Oligo
cuggcucaagcucggaggu

SEQ ID NO: 56848 - RNA, 19 nt, Artificial Sequence
  Antisense Oligo
accuccgagcuugagccag

SEQ ID NO: 56849 - RNA, 19 nt, Artificial Sequence
  Sense Oligo
uggcucaagcucggaggug

SEQ ID NO: 56850 - RNA, 19 nt, Artificial Sequence
  Antisense Oligo
caccuccgagcuugagcca

SEQ ID NO: 56851 - RNA, 19 nt, Artificial Sequence
  Sense Oligo
gcucaagcucggaggugga

SEQ ID NO: 56852 - RNA, 19 nt, Artificial Sequence
  Antisense Oligo
uccaccuccgagcuugagc

SEQ ID NO: 56853 - RNA, 19 nt, Artificial Sequence
  Sense Oligo
cucaagcucggagguggaa

SEQ ID NO: 56854 - RNA, 19 nt, Artificial Sequence
  Antisense Oligo
uuccaccuccgagcuugag

SEQ ID NO: 56855 - RNA, 19 nt, Artificial Sequence
  Sense Oligo
ucaagcucggagguggaag

SEQ ID NO: 56856 - RNA, 19 nt, Artificial Sequence
  Antisense Oligo
cuuccaccuccgagcuuga

SEQ ID NO: 56857 - RNA, 19 nt, Artificial Sequence
  Sense Oligo
caagcucggagguggaagg

SEQ ID NO: 56858 - RNA, 19 nt, Artificial Sequence
  Antisense Oligo
ccuuccaccuccgagcuug

SEQ ID NO: 56859 - RNA, 19 nt, Artificial Sequence
  Sense Oligo
aagcucggagguggaaggg

SEQ ID NO: 56860 - RNA, 19 nt, Artificial Sequence
  Antisense Oligo
cccuuccaccuccgagcuu

SEQ ID NO: 56861 - RNA, 19 nt, Artificial Sequence
  Sense Oligo
agcucggagguggaagggu

SEQ ID NO: 56862 - RNA, 19 nt, Artificial Sequence
  Antisense Oligo
acccuuccaccuccgagcu

SEQ ID NO: 56863 - RNA, 19 nt, Artificial Sequence
  Sense Oligo
ggagguggaagggucugga

SEQ ID NO: 56864 - RNA, 19 nt, Artificial Sequence
  Antisense Oligo
uccagacccuuccaccucc

SEQ ID NO: 56865 - RNA, 19 nt, Artificial Sequence
  Sense Oligo
agguggaagggucuggagc

SEQ ID NO: 56866 - RNA, 19 nt, Artificial Sequence
  Antisense Oligo
gcuccagacccuuccaccu

SEQ ID NO: 56867 - RNA, 19 nt, Artificial Sequence
  Sense Oligo
guggaagggucuggagcga

SEQ ID NO: 56868 - RNA, 19 nt, Artificial Sequence
  Antisense Oligo
ucgcuccagacccuuccac

SEQ ID NO: 56869 - RNA, 19 nt, Artificial Sequence
  Sense Oligo
uggaagggucuggagcgag

SEQ ID NO: 56870 - RNA, 19 nt, Artificial Sequence
  Antisense Oligo
cucgcuccagacccuucca

SEQ ID NO: 56871 - RNA, 19 nt, Artificial Sequence
  Sense Oligo
ggaagggucuggagcgagu

SEQ ID NO: 56872 - RNA, 19 nt, Artificial Sequence
  Antisense Oligo
acucgcuccagacccuucc

SEQ ID NO: 56873 - RNA, 19 nt, Artificial Sequence
  Sense Oligo
gaagggucuggagcgaguc

SEQ ID NO: 56874 - RNA, 19 nt, Artificial Sequence
  Antisense Oligo
gacucgcuccagacccuuc

SEQ ID NO: 56875 - RNA, 19 nt, Artificial Sequence
  Sense Oligo
aagggucuggagcgagucc

SEQ ID NO: 56876 - RNA, 19 nt, Artificial Sequence
  Antisense Oligo
ggacucgcuccagacccuu

SEQ ID NO: 56877 - RNA, 19 nt, Artificial Sequence
  Sense Oligo
ggagcgaguccacugguac

SEQ ID NO: 56878 - RNA, 19 nt, Artificial Sequence
  Antisense Oligo
guaccaguggacucgcucc

SEQ ID NO: 56879 - RNA, 19 nt, Artificial Sequence
  Sense Oligo
gagcgaguccacugguaca

SEQ ID NO: 56880 - RNA, 19 nt, Artificial Sequence
  Antisense Oligo
uguaccaguggacucgcuc

SEQ ID NO: 56881 - RNA, 19 nt, Artificial Sequence
  Sense Oligo
agcgaguccacugguacag

SEQ ID NO: 56882 - RNA, 19 nt, Artificial Sequence
  Antisense Oligo
cuguaccaguggacucgcu

SEQ ID NO: 56883 - RNA, 19 nt, Artificial Sequence
  Sense Oligo
ugagcuucaaagggugucc

SEQ ID NO: 56884 - RNA, 19 nt, Artificial Sequence
  Antisense Oligo
ggacacccuuugaagcuca

SEQ ID NO: 56885 - RNA, 19 nt, Artificial Sequence
  Sense Oligo
gagcuucaaagggugucca

SEQ ID NO: 56886 - RNA, 19 nt, Artificial Sequence
  Antisense Oligo
uggacacccuuugaagcuc

SEQ ID NO: 56887 - RNA, 19 nt, Artificial Sequence
  Sense Oligo
uucaaaggguguccagaug

SEQ ID NO: 56888 - RNA, 19 nt, Artificial Sequence
  Antisense Oligo
caucuggacacccuuugaa

SEQ ID NO: 56889 - RNA, 19 nt, Artificial Sequence
  Sense Oligo
ucaaaggguguccagaugc

SEQ ID NO: 56890 - RNA, 19 nt, Artificial Sequence
  Antisense Oligo
gcaucuggacacccuuuga

SEQ ID NO: 56891 - RNA, 19 nt, Artificial Sequence
  Sense Oligo
caaaggguguccagaugcu

SEQ ID NO: 56892 - RNA, 19 nt, Artificial Sequence
  Antisense Oligo
agcaucuggacacccuuug

SEQ ID NO: 56893 - RNA, 19 nt, Artificial Sequence
  Sense Oligo
aaaggguguccagaugcua

SEQ ID NO: 56894 - RNA, 19 nt, Artificial Sequence
  Antisense Oligo
uagcaucuggacacccuuu

SEQ ID NO: 56895 - RNA, 19 nt, Artificial Sequence
  Sense Oligo
uguccagaugcuaugaagc

SEQ ID NO: 56896 - RNA, 19 nt, Artificial Sequence
  Antisense Oligo
gcuucauagcaucuggaca

SEQ ID NO: 56897 - RNA, 19 nt, Artificial Sequence
  Sense Oligo
ggguccacgugguuugugc

SEQ ID NO: 56898 - RNA, 19 nt, Artificial Sequence
  Antisense Oligo
gcacaaaccacguggaccc

SEQ ID NO: 56899 - RNA, 19 nt, Artificial Sequence
  Sense Oligo
gguccacgugguuugugcc

SEQ ID NO: 56900 - RNA, 19 nt, Artificial Sequence
  Antisense Oligo
ggcacaaaccacguggacc

SEQ ID NO: 56901 - RNA, 19 nt, Artificial Sequence
  Sense Oligo
guccacgugguuugugccu

SEQ ID NO: 56902 - RNA, 19 nt, Artificial Sequence
  Antisense Oligo
aggcacaaaccacguggac

SEQ ID NO: 56903 - RNA, 19 nt, Artificial Sequence
  Sense Oligo
acgugguuugugccucagg

SEQ ID NO: 56904 - RNA, 19 nt, Artificial Sequence
  Antisense Oligo
ccugaggcacaaaccacgu

SEQ ID NO: 56905 - RNA, 19 nt, Artificial Sequence
  Sense Oligo
uugugccucaggguccaaa

SEQ ID NO: 56906 - RNA, 19 nt, Artificial Sequence
  Antisense Oligo
uuuggacccugaggcacaa

SEQ ID NO: 56907 - RNA, 19 nt, Artificial Sequence
  Sense Oligo
ugugccucaggguccaaaa

SEQ ID NO: 56908 - RNA, 19 nt, Artificial Sequence
  Antisense Oligo
uuuuggacccugaggcaca

SEQ ID NO: 56909 - RNA, 19 nt, Artificial Sequence
  Sense Oligo
ccaccugcauucuaccggu

SEQ ID NO: 56910 - RNA, 19 nt, Artificial Sequence
  Antisense Oligo
accgguagaaugcaggugg

SEQ ID NO: 56911 - RNA, 19 nt, Artificial Sequence
  Sense Oligo
accugcauucuaccggugg

SEQ ID NO: 56912 - RNA, 19 nt, Artificial Sequence
  Antisense Oligo
ccaccgguagaaugcaggu

SEQ ID NO: 56913 - RNA, 19 nt, Artificial Sequence
  Sense Oligo
ccugcauucuaccgguggc

SEQ ID NO: 56914 - RNA, 19 nt, Artificial Sequence
  Antisense Oligo
gccaccgguagaaugcagg

SEQ ID NO: 56915 - RNA, 19 nt, Artificial Sequence
  Sense Oligo
cugcauucuaccgguggcg

SEQ ID NO: 56916 - RNA, 19 nt, Artificial Sequence
  Antisense Oligo
cgccaccgguagaaugcag

SEQ ID NO: 56917 - RNA, 19 nt, Artificial Sequence
  Sense Oligo
ugcauucuaccgguggcgu

SEQ ID NO: 56918 - RNA, 19 nt, Artificial Sequence
  Antisense Oligo
acgccaccgguagaaugca

SEQ ID NO: 56919 - RNA, 19 nt, Artificial Sequence
  Sense Oligo
gcauucuaccgguggcguc

SEQ ID NO: 56920 - RNA, 19 nt, Artificial Sequence
  Antisense Oligo
gacgccaccgguagaaugc

SEQ ID NO: 56921 - RNA, 19 nt, Artificial Sequence
  Sense Oligo
cauucuaccgguggcgucu

SEQ ID NO: 56922 - RNA, 19 nt, Artificial Sequence
  Antisense Oligo
agacgccaccgguagaaug

SEQ ID NO: 56923 - RNA, 19 nt, Artificial Sequence
  Sense Oligo
auucuaccgguggcgucug

SEQ ID NO: 56924 - RNA, 19 nt, Artificial Sequence
  Antisense Oligo
cagacgccaccgguagaau

SEQ ID NO: 56925 - RNA, 19 nt, Artificial Sequence
  Sense Oligo
uucuaccgguggcgucugc

SEQ ID NO: 56926 - RNA, 19 nt, Artificial Sequence
  Antisense Oligo
gcagacgccaccgguagaa

SEQ ID NO: 56927 - RNA, 19 nt, Artificial Sequence
  Sense Oligo
ucuaccgguggcgucugca

SEQ ID NO: 56928 - RNA, 19 nt, Artificial Sequence
  Antisense Oligo
ugcagacgccaccgguaga

SEQ ID NO: 56929 - RNA, 19 nt, Artificial Sequence
  Sense Oligo
ucugcagaagacgaauggc

SEQ ID NO: 56930 - RNA, 19 nt, Artificial Sequence
  Antisense Oligo
gccauucgucuucugcaga

SEQ ID NO: 56931 - RNA, 19 nt, Artificial Sequence
  Sense Oligo
cugcagaagacgaauggcu

SEQ ID NO: 56932 - RNA, 19 nt, Artificial Sequence
  Antisense Oligo
agccauucgucuucugcag

SEQ ID NO: 56933 - RNA, 19 nt, Artificial Sequence
  Sense Oligo
ugcagaagacgaauggcuu

SEQ ID NO: 56934 - RNA, 19 nt, Artificial Sequence
  Antisense Oligo
aagccauucgucuucugca

SEQ ID NO: 56935 - RNA, 19 nt, Artificial Sequence
  Sense Oligo
gcagaagacgaauggcuug

SEQ ID NO: 56936 - RNA, 19 nt, Artificial Sequence
  Antisense Oligo
caagccauucgucuucugc

SEQ ID NO: 56937 - RNA, 19 nt, Artificial Sequence
  Sense Oligo
cagaagacgaauggcuuga

SEQ ID NO: 56938 - RNA, 19 nt, Artificial Sequence
  Antisense Oligo
ucaagccauucgucuucug

SEQ ID NO: 56939 - RNA, 19 nt, Artificial Sequence
  Sense Oligo
agaagacgaauggcuugaa

SEQ ID NO: 56940 - RNA, 19 nt, Artificial Sequence
  Antisense Oligo
uucaagccauucgucuucu

SEQ ID NO: 56941 - RNA, 19 nt, Artificial Sequence
  Sense Oligo
gaagacgaauggcuugaag

SEQ ID NO: 56942 - RNA, 19 nt, Artificial Sequence
  Antisense Oligo
cuucaagccauucgucuuc

SEQ ID NO: 56943 - RNA, 19 nt, Artificial Sequence
  Sense Oligo
acgaauggcuugaaggagc

SEQ ID NO: 56944 - RNA, 19 nt, Artificial Sequence
  Antisense Oligo
gcuccuucaagccauucgu

SEQ ID NO: 56945 - RNA, 19 nt, Artificial Sequence
  Sense Oligo
cgaauggcuugaaggagcu

SEQ ID NO: 56946 - RNA, 19 nt, Artificial Sequence
  Antisense Oligo
agcuccuucaagccauucg

SEQ ID NO: 56947 - RNA, 19 nt, Artificial Sequence
  Sense Oligo
gaauggcuugaaggagcug

SEQ ID NO: 56948 - RNA, 19 nt, Artificial Sequence
  Antisense Oligo
cagcuccuucaagccauuc

SEQ ID NO: 56949 - RNA, 19 nt, Artificial Sequence
  Sense Oligo
aauggcuugaaggagcugg

SEQ ID NO: 56950 - RNA, 19 nt, Artificial Sequence
  Antisense Oligo
ccagcuccuucaagccauu

SEQ ID NO: 56951 - RNA, 19 nt, Artificial Sequence
  Sense Oligo
auggcuugaaggagcuggc

SEQ ID NO: 56952 - RNA, 19 nt, Artificial Sequence
  Antisense Oligo
gccagcuccuucaagccau

SEQ ID NO: 56953 - RNA, 19 nt, Artificial Sequence
  Sense Oligo
uggcuugaaggagcuggca

SEQ ID NO: 56954 - RNA, 19 nt, Artificial Sequence
  Antisense Oligo
ugccagcuccuucaagcca

SEQ ID NO: 56955 - RNA, 19 nt, Artificial Sequence
  Sense Oligo
ggcuugaaggagcuggcac

SEQ ID NO: 56956 - RNA, 19 nt, Artificial Sequence
  Antisense Oligo
gugccagcuccuucaagcc

SEQ ID NO: 56957 - RNA, 19 nt, Artificial Sequence
  Sense Oligo
accauuucauuucuuuguc

SEQ ID NO: 56958 - RNA, 19 nt, Artificial Sequence
  Antisense Oligo
gacaaagaaaugaaauggu

SEQ ID NO: 56959 - RNA, 19 nt, Artificial Sequence
  Sense Oligo
ccauuucauuucuuugucg

SEQ ID NO: 56960 - RNA, 19 nt, Artificial Sequence
  Antisense Oligo
cgacaaagaaaugaaaugg

SEQ ID NO: 56961 - RNA, 19 nt, Artificial Sequence
  Sense Oligo
auuucauuucuuugucgug

SEQ ID NO: 56962 - RNA, 19 nt, Artificial Sequence
  Antisense Oligo
cacgacaaagaaaugaaau

SEQ ID NO: 56963 - RNA, 19 nt, Artificial Sequence
  Sense Oligo
aaaaggcccucugugaugc

SEQ ID NO: 56964 - RNA, 19 nt, Artificial Sequence
  Antisense Oligo
gcaucacagagggccuuuu

SEQ ID NO: 56965 - RNA, 19 nt, Artificial Sequence
  Sense Oligo
aaaggcccucugugaugca

SEQ ID NO: 56966 - RNA, 19 nt, Artificial Sequence
  Antisense Oligo
ugcaucacagagggccuuu

SEQ ID NO: 56967 - RNA, 19 nt, Artificial Sequence
  Sense Oligo
aaggcccucugugaugcac

SEQ ID NO: 56968 - RNA, 19 nt, Artificial Sequence
  Antisense Oligo
gugcaucacagagggccuu

SEQ ID NO: 56969 - RNA, 19 nt, Artificial Sequence
  Sense Oligo
ccucugugaugcacuucug

SEQ ID NO: 56970 - RNA, 19 nt, Artificial Sequence
  Antisense Oligo
cagaagugcaucacagagg

SEQ ID NO: 56971 - RNA, 19 nt, Artificial Sequence
  Sense Oligo
cucugugaugcacuucugu

SEQ ID NO: 56972 - RNA, 19 nt, Artificial Sequence
  Antisense Oligo
acagaagugcaucacagag

SEQ ID NO: 56973 - RNA, 19 nt, Artificial Sequence
  Sense Oligo
ucugugaugcacuucuguu

SEQ ID NO: 56974 - RNA, 19 nt, Artificial Sequence
  Antisense Oligo
aacagaagugcaucacaga

SEQ ID NO: 56975 - RNA, 19 nt, Artificial Sequence
  Sense Oligo
cugugaugcacuucuguuc

SEQ ID NO: 56976 - RNA, 19 nt, Artificial Sequence
  Antisense Oligo
gaacagaagugcaucacag

SEQ ID NO: 56977 - RNA, 19 nt, Artificial Sequence
  Sense Oligo
ugugaugcacuucuguucu

SEQ ID NO: 56978 - RNA, 19 nt, Artificial Sequence
  Antisense Oligo
agaacagaagugcaucaca

SEQ ID NO: 56979 - RNA, 19 nt, Artificial Sequence
  Sense Oligo
augcacuucuguucucugg

SEQ ID NO: 56980 - RNA, 19 nt, Artificial Sequence
  Antisense Oligo
ccagagaacagaagugcau

SEQ ID NO: 56981 - RNA, 19 nt, Artificial Sequence
  Sense Oligo
gcacuucuguucucuggaa

SEQ ID NO: 56982 - RNA, 19 nt, Artificial Sequence
  Antisense Oligo
uuccagagaacagaagugc

SEQ ID NO: 56983 - RNA, 19 nt, Artificial Sequence
  Sense Oligo
cacuucuguucucuggaau

SEQ ID NO: 56984 - RNA, 19 nt, Artificial Sequence
  Antisense Oligo
auuccagagaacagaagug

SEQ ID NO: 56985 - RNA, 19 nt, Artificial Sequence
  Sense Oligo
uucuguucucuggaauaug

SEQ ID NO: 56986 - RNA, 19 nt, Artificial Sequence
  Antisense Oligo
cauauuccagagaacagaa

SEQ ID NO: 56987 - RNA, 19 nt, Artificial Sequence
  Sense Oligo
ucuguucucuggaauaugc

SEQ ID NO: 56988 - RNA, 19 nt, Artificial Sequence
  Antisense Oligo
gcauauuccagagaacaga

SEQ ID NO: 56989 - RNA, 19 nt, Artificial Sequence
  Sense Oligo
cuguucucuggaauaugcc

SEQ ID NO: 56990 - RNA, 19 nt, Artificial Sequence
  Antisense Oligo
ggcauauuccagagaacag

SEQ ID NO: 56991 - RNA, 19 nt, Artificial Sequence
  Sense Oligo
cucuggaauaugccauuuu

SEQ ID NO: 56992 - RNA, 19 nt, Artificial Sequence
  Antisense Oligo
aaaauggcauauuccagag

SEQ ID NO: 56993 - RNA, 19 nt, Artificial Sequence
  Sense Oligo
ucuggaauaugccauuuug

SEQ ID NO: 56994 - RNA, 19 nt, Artificial Sequence
  Antisense Oligo
caaaauggcauauuccaga

SEQ ID NO: 56995 - RNA, 19 nt, Artificial Sequence
  Sense Oligo
cuggaauaugccauuuugg

SEQ ID NO: 56996 - RNA, 19 nt, Artificial Sequence
  Antisense Oligo
ccaaaauggcauauuccag

SEQ ID NO: 56997 - RNA, 19 nt, Artificial Sequence
  Sense Oligo
uggaauaugccauuuuggg

SEQ ID NO: 56998 - RNA, 19 nt, Artificial Sequence
  Antisense Oligo
cccaaaauggcauauucca

SEQ ID NO: 56999 - RNA, 19 nt, Artificial Sequence
  Sense Oligo
ggaauaugccauuuuggga

SEQ ID NO: 57000 - RNA, 19 nt, Artificial Sequence
  Antisense Oligo
ucccaaaauggcauauucc

SEQ ID NO: 57001 - RNA, 19 nt, Artificial Sequence
  Sense Oligo
agacgcauucaaaggccca

SEQ ID NO: 57002 - RNA, 19 nt, Artificial Sequence
  Antisense Oligo
ugggccuuugaaugcgucu

SEQ ID NO: 57003 - RNA, 19 nt, Artificial Sequence
  Sense Oligo
gacgcauucaaaggcccac

SEQ ID NO: 57004 - RNA, 19 nt, Artificial Sequence
  Antisense Oligo
gugggccuuugaaugcguc

SEQ ID NO: 57005 - RNA, 19 nt, Artificial Sequence
  Sense Oligo
cauucaaaggcccaccaca

SEQ ID NO: 57006 - RNA, 19 nt, Artificial Sequence
  Antisense Oligo
uguggugggccuuugaaug

SEQ ID NO: 57007 - RNA, 19 nt, Artificial Sequence
  Sense Oligo
agacugacucauauaaccc

SEQ ID NO: 57008 - RNA, 19 nt, Artificial Sequence
  Antisense Oligo
ggguuauaugagucagucu

SEQ ID NO: 57009 - RNA, 19 nt, Artificial Sequence
  Sense Oligo
gacugacucauauaaccca

SEQ ID NO: 57010 - RNA, 19 nt, Artificial Sequence
  Antisense Oligo
uggguuauaugagucaguc

SEQ ID NO: 57011 - RNA, 19 nt, Artificial Sequence
  Sense Oligo
acugacucauauaacccau

SEQ ID NO: 57012 - RNA, 19 nt, Artificial Sequence
  Antisense Oligo
auggguuauaugagucagu

SEQ ID NO: 57013 - RNA, 19 nt, Artificial Sequence
  Sense Oligo
cugacucauauaacccaug

SEQ ID NO: 57014 - RNA, 19 nt, Artificial Sequence
  Antisense Oligo
cauggguuauaugagucag

SEQ ID NO: 57015 - RNA, 19 nt, Artificial Sequence
  Sense Oligo
uauaacccaugacauguaa

SEQ ID NO: 57016 - RNA, 19 nt, Artificial Sequence
  Antisense Oligo
uuacaugucauggguuaua

SEQ ID NO: 57017 - RNA, 19 nt, Artificial Sequence
  Sense Oligo
auaacccaugacauguaaa

SEQ ID NO: 57018 - RNA, 19 nt, Artificial Sequence
  Antisense Oligo
uuuacaugucauggguuau

SEQ ID NO: 57019 - RNA, 19 nt, Artificial Sequence
  Sense Oligo
cccaugacauguaaauuuu

SEQ ID NO: 57020 - RNA, 19 nt, Artificial Sequence
  Antisense Oligo
aaaauuuacaugucauggg

SEQ ID NO: 57021 - RNA, 19 nt, Artificial Sequence
  Sense Oligo
ccaugacauguaaauuuug

SEQ ID NO: 57022 - RNA, 19 nt, Artificial Sequence
  Antisense Oligo
caaaauuuacaugucaugg

SEQ ID NO: 57023 - RNA, 19 nt, Artificial Sequence
  Sense Oligo
caugacauguaaauuuugc

SEQ ID NO: 57024 - RNA, 19 nt, Artificial Sequence
  Antisense Oligo
gcaaaauuuacaugucaug

SEQ ID NO: 57025 - RNA, 19 nt, Artificial Sequence
  Sense Oligo
cauguaaauuuugcuguug

SEQ ID NO: 57026 - RNA, 19 nt, Artificial Sequence
  Antisense Oligo
caacagcaaaauuuacaug

SEQ ID NO: 57027 - RNA, 19 nt, Artificial Sequence
  Sense Oligo
auguaaauuuugcuguugc

SEQ ID NO: 57028 - RNA, 19 nt, Artificial Sequence
  Antisense Oligo
gcaacagcaaaauuuacau

SEQ ID NO: 57029 - RNA, 19 nt, Artificial Sequence
  Sense Oligo
uguaaauuuugcuguugcc

SEQ ID NO: 57030 - RNA, 19 nt, Artificial Sequence
  Antisense Oligo
ggcaacagcaaaauuuaca

SEQ ID NO: 57031 - RNA, 19 nt, Artificial Sequence
  Sense Oligo
guaaauuuugcuguugccu

SEQ ID NO: 57032 - RNA, 19 nt, Artificial Sequence
  Antisense Oligo
aggcaacagcaaaauuuac

SEQ ID NO: 57033 - RNA, 19 nt, Artificial Sequence
  Sense Oligo
uaaauuuugcuguugccug

SEQ ID NO: 57034 - RNA, 19 nt, Artificial Sequence
  Antisense Oligo
caggcaacagcaaaauuua

SEQ ID NO: 57035 - RNA, 19 nt, Artificial Sequence
  Sense Oligo
aaauuuugcuguugccuga

SEQ ID NO: 57036 - RNA, 19 nt, Artificial Sequence
  Antisense Oligo
ucaggcaacagcaaaauuu

SEQ ID NO: 57037 - RNA, 19 nt, Artificial Sequence
  Sense Oligo
aauuuugcuguugccugag

SEQ ID NO: 57038 - RNA, 19 nt, Artificial Sequence
  Antisense Oligo
cucaggcaacagcaaaauu

SEQ ID NO: 57039 - RNA, 19 nt, Artificial Sequence
  Sense Oligo
uugcuguugccugaguaaa

SEQ ID NO: 57040 - RNA, 19 nt, Artificial Sequence
  Antisense Oligo
uuuacucaggcaacagcaa

SEQ ID NO: 57041 - RNA, 19 nt, Artificial Sequence
  Sense Oligo
ugcuguugccugaguaaau

SEQ ID NO: 57042 - RNA, 19 nt, Artificial Sequence
  Antisense Oligo
auuuacucaggcaacagca

SEQ ID NO: 57043 - RNA, 19 nt, Artificial Sequence
  Sense Oligo
gcuguugccugaguaaaua

SEQ ID NO: 57044 - RNA, 19 nt, Artificial Sequence
  Antisense Oligo
uauuuacucaggcaacagc

SEQ ID NO: 57045 - RNA, 19 nt, Artificial Sequence
  Sense Oligo
cuguugccugaguaaauau

SEQ ID NO: 57046 - RNA, 19 nt, Artificial Sequence
  Antisense Oligo
auauuuacucaggcaacag

SEQ ID NO: 57047 - RNA, 19 nt, Artificial Sequence
  Sense Oligo
uguugccugaguaaauauu

SEQ ID NO: 57048 - RNA, 19 nt, Artificial Sequence
  Antisense Oligo
aauauuuacucaggcaaca

SEQ ID NO: 57049 - RNA, 19 nt, Artificial Sequence
  Sense Oligo
guugccugaguaaauauuu

SEQ ID NO: 57050 - RNA, 19 nt, Artificial Sequence
  Antisense Oligo
aaauauuuacucaggcaac

SEQ ID NO: 57051 - RNA, 19 nt, Artificial Sequence
  Sense Oligo
aaaggucuagaauccuguc

SEQ ID NO: 57052 - RNA, 19 nt, Artificial Sequence
  Antisense Oligo
gacaggauucuagaccuuu

SEQ ID NO: 57053 - RNA, 19 nt, Artificial Sequence
  Sense Oligo
aaggucuagaauccugucc

SEQ ID NO: 57054 - RNA, 19 nt, Artificial Sequence
  Antisense Oligo
ggacaggauucuagaccuu

SEQ ID NO: 57055 - RNA, 19 nt, Artificial Sequence
  Sense Oligo
aggucuagaauccugucca

SEQ ID NO: 57056 - RNA, 19 nt, Artificial Sequence
  Antisense Oligo
uggacaggauucuagaccu

SEQ ID NO: 57057 - RNA, 19 nt, Artificial Sequence
  Sense Oligo
guccaccuugccuccaaaa

SEQ ID NO: 57058 - RNA, 19 nt, Artificial Sequence
  Antisense Oligo
uuuuggaggcaagguggac

SEQ ID NO: 57059 - RNA, 19 nt, Artificial Sequence
  Sense Oligo
uccaccuugccuccaaaag

SEQ ID NO: 57060 - RNA, 19 nt, Artificial Sequence
  Antisense Oligo
cuuuuggaggcaaggugga

SEQ ID NO: 57061 - RNA, 19 nt, Artificial Sequence
  Sense Oligo
ccaccuugccuccaaaagu

SEQ ID NO: 57062 - RNA, 19 nt, Artificial Sequence
  Antisense Oligo
acuuuuggaggcaaggugg

SEQ ID NO: 57063 - RNA, 19 nt, Artificial Sequence
  Sense Oligo
ccuugccuccaaaaguacc

SEQ ID NO: 57064 - RNA, 19 nt, Artificial Sequence
  Antisense Oligo
gguacuuuuggaggcaagg

SEQ ID NO: 57065 - RNA, 19 nt, Artificial Sequence
  Sense Oligo
cuugccuccaaaaguaccc

SEQ ID NO: 57066 - RNA, 19 nt, Artificial Sequence
  Antisense Oligo
ggguacuuuuggaggcaag

SEQ ID NO: 57067 - RNA, 19 nt, Artificial Sequence
  Sense Oligo
cccugguaugggccuauau

SEQ ID NO: 57068 - RNA, 19 nt, Artificial Sequence
  Antisense Oligo
auauaggcccauaccaggg

SEQ ID NO: 57069 - RNA, 19 nt, Artificial Sequence
  Sense Oligo
ccugguaugggccuauauu

SEQ ID NO: 57070 - RNA, 19 nt, Artificial Sequence
  Antisense Oligo
aauauaggcccauaccagg

SEQ ID NO: 57071 - RNA, 19 nt, Artificial Sequence
  Sense Oligo
cugguaugggccuauauuc

SEQ ID NO: 57072 - RNA, 19 nt, Artificial Sequence
  Antisense Oligo
gaauauaggcccauaccag

SEQ ID NO: 57073 - RNA, 19 nt, Artificial Sequence
  Sense Oligo
ugguaugggccuauauucu

SEQ ID NO: 57074 - RNA, 19 nt, Artificial Sequence
  Antisense Oligo
agaauauaggcccauacca

SEQ ID NO: 57075 - RNA, 19 nt, Artificial Sequence
  Sense Oligo
gguaugggccuauauucua

SEQ ID NO: 57076 - RNA, 19 nt, Artificial Sequence
  Antisense Oligo
uagaauauaggcccauacc

SEQ ID NO: 57077 - RNA, 19 nt, Artificial Sequence
  Sense Oligo
guaugggccuauauucuaa

SEQ ID NO: 57078 - RNA, 19 nt, Artificial Sequence
  Antisense Oligo
uuagaauauaggcccauac

SEQ ID NO: 57079 - RNA, 19 nt, Artificial Sequence
  Sense Oligo
augggccuauauucuaauu

SEQ ID NO: 57080 - RNA, 19 nt, Artificial Sequence
  Antisense Oligo
aauuagaauauaggcccau

SEQ ID NO: 57081 - RNA, 19 nt, Artificial Sequence
  Sense Oligo
ugggccuauauucuaauug

SEQ ID NO: 57082 - RNA, 19 nt, Artificial Sequence
  Antisense Oligo
caauuagaauauaggccca

SEQ ID NO: 57083 - RNA, 19 nt, Artificial Sequence
  Sense Oligo
gggccuauauucuaauugc

SEQ ID NO: 57084 - RNA, 19 nt, Artificial Sequence
  Antisense Oligo
gcaauuagaauauaggccc

SEQ ID NO: 57085 - RNA, 19 nt, Artificial Sequence
  Sense Oligo
ggccuauauucuaauugcu

SEQ ID NO: 57086 - RNA, 19 nt, Artificial Sequence
  Antisense Oligo
agcaauuagaauauaggcc

SEQ ID NO: 57087 - RNA, 19 nt, Artificial Sequence
  Sense Oligo
gccuauauucuaauugcuc

SEQ ID NO: 57088 - RNA, 19 nt, Artificial Sequence
  Antisense Oligo
gagcaauuagaauauaggc

SEQ ID NO: 57089 - RNA, 19 nt, Artificial Sequence
  Sense Oligo
ccuauauucuaauugcucu

SEQ ID NO: 57090 - RNA, 19 nt, Artificial Sequence
  Antisense Oligo
agagcaauuagaauauagg

SEQ ID NO: 57091 - RNA, 19 nt, Artificial Sequence
  Sense Oligo
ucuaauugcucuuuacuug

SEQ ID NO: 57092 - RNA, 19 nt, Artificial Sequence
  Antisense Oligo
caaguaaagagcaauuaga

SEQ ID NO: 57093 - RNA, 19 nt, Artificial Sequence
  Sense Oligo
cauuuauuaagcuucaggc

SEQ ID NO: 57094 - RNA, 19 nt, Artificial Sequence
  Antisense Oligo
gccugaagcuuaauaaaug

SEQ ID NO: 57095 - RNA, 19 nt, Artificial Sequence
  Sense Oligo
auuaagcuucaggcaggug

SEQ ID NO: 57096 - RNA, 19 nt, Artificial Sequence
  Antisense Oligo
caccugccugaagcuuaau

SEQ ID NO: 57097 - RNA, 19 nt, Artificial Sequence
  Sense Oligo
uuaagcuucaggcaggugu

SEQ ID NO: 57098 - RNA, 19 nt, Artificial Sequence
  Antisense Oligo
acaccugccugaagcuuaa

SEQ ID NO: 57099 - RNA, 19 nt, Artificial Sequence
  Sense Oligo
uaagcuucaggcagguguc

SEQ ID NO: 57100 - RNA, 19 nt, Artificial Sequence
  Antisense Oligo
gacaccugccugaagcuua

SEQ ID NO: 57101 - RNA, 19 nt, Artificial Sequence
  Sense Oligo
aagcuucaggcagguguca

SEQ ID NO: 57102 - RNA, 19 nt, Artificial Sequence
  Antisense Oligo
ugacaccugccugaagcuu

SEQ ID NO: 57103 - RNA, 19 nt, Artificial Sequence
  Sense Oligo
uucaggcaggugucaugua

SEQ ID NO: 57104 - RNA, 19 nt, Artificial Sequence
  Antisense Oligo
uacaugacaccugccugaa

SEQ ID NO: 57105 - RNA, 19 nt, Artificial Sequence
  Sense Oligo
ucaggcaggugucauguaa

SEQ ID NO: 57106 - RNA, 19 nt, Artificial Sequence
  Antisense Oligo
uuacaugacaccugccuga

SEQ ID NO: 57107 - RNA, 19 nt, Artificial Sequence
  Sense Oligo
caggcaggugucauguaac

SEQ ID NO: 57108 - RNA, 19 nt, Artificial Sequence
  Antisense Oligo
guuacaugacaccugccug

SEQ ID NO: 57109 - RNA, 19 nt, Artificial Sequence
  Sense Oligo
aggcaggugucauguaacu

SEQ ID NO: 57110 - RNA, 19 nt, Artificial Sequence
  Antisense Oligo
aguuacaugacaccugccu

SEQ ID NO: 57111 - RNA, 19 nt, Artificial Sequence
  Sense Oligo
ggcaggugucauguaacuu

SEQ ID NO: 57112 - RNA, 19 nt, Artificial Sequence
  Antisense Oligo
aaguuacaugacaccugcc

SEQ ID NO: 57113 - RNA, 19 nt, Artificial Sequence
  Sense Oligo
gcaggugucauguaacuua

SEQ ID NO: 57114 - RNA, 19 nt, Artificial Sequence
  Antisense Oligo
uaaguuacaugacaccugc

SEQ ID NO: 57115 - RNA, 19 nt, Artificial Sequence
  Sense Oligo
caggugucauguaacuuaa

SEQ ID NO: 57116 - RNA, 19 nt, Artificial Sequence
  Antisense Oligo
uuaaguuacaugacaccug

SEQ ID NO: 57117 - RNA, 19 nt, Artificial Sequence
  Sense Oligo
aggugucauguaacuuaac

SEQ ID NO: 57118 - RNA, 19 nt, Artificial Sequence
  Antisense Oligo
guuaaguuacaugacaccu

SEQ ID NO: 57119 - RNA, 19 nt, Artificial Sequence
  Sense Oligo
aauuagcgugggaugcucu

SEQ ID NO: 57120 - RNA, 19 nt, Artificial Sequence
  Antisense Oligo
agagcaucccacgcuaauu

SEQ ID NO: 57121 - RNA, 19 nt, Artificial Sequence
  Sense Oligo
auuagcgugggaugcucug

SEQ ID NO: 57122 - RNA, 19 nt, Artificial Sequence
  Antisense Oligo
cagagcaucccacgcuaau

SEQ ID NO: 57123 - RNA, 19 nt, Artificial Sequence
  Sense Oligo
uuagcgugggaugcucugg

SEQ ID NO: 57124 - RNA, 19 nt, Artificial Sequence
  Antisense Oligo
ccagagcaucccacgcuaa

SEQ ID NO: 57125 - RNA, 19 nt, Artificial Sequence
  Sense Oligo
uagcgugggaugcucugga

SEQ ID NO: 57126 - RNA, 19 nt, Artificial Sequence
  Antisense Oligo
uccagagcaucccacgcua

SEQ ID NO: 57127 - RNA, 19 nt, Artificial Sequence
  Sense Oligo
gugggaugcucuggacagu

SEQ ID NO: 57128 - RNA, 19 nt, Artificial Sequence
  Antisense Oligo
acuguccagagcaucccac

SEQ ID NO: 57129 - RNA, 19 nt, Artificial Sequence
  Sense Oligo
ugggaugcucuggacaguc

SEQ ID NO: 57130 - RNA, 19 nt, Artificial Sequence
  Antisense Oligo
gacuguccagagcauccca

SEQ ID NO: 57131 - RNA, 19 nt, Artificial Sequence
  Sense Oligo
gggaugcucuggacaguca

SEQ ID NO: 57132 - RNA, 19 nt, Artificial Sequence
  Antisense Oligo
ugacuguccagagcauccc

SEQ ID NO: 57133 - RNA, 19 nt, Artificial Sequence
  Sense Oligo
ggaugcucuggacagucau

SEQ ID NO: 57134 - RNA, 19 nt, Artificial Sequence
  Antisense Oligo
augacuguccagagcaucc

SEQ ID NO: 57135 - RNA, 19 nt, Artificial Sequence
  Sense Oligo
gaugcucuggacagucauu

SEQ ID NO: 57136 - RNA, 19 nt, Artificial Sequence
  Antisense Oligo
aaugacuguccagagcauc

SEQ ID NO: 57137 - RNA, 19 nt, Artificial Sequence
  Sense Oligo
augcucuggacagucauuc

SEQ ID NO: 57138 - RNA, 19 nt, Artificial Sequence
  Antisense Oligo
gaaugacuguccagagcau

SEQ ID NO: 57139 - RNA, 19 nt, Artificial Sequence
  Sense Oligo
ucuggacagucauucucau

SEQ ID NO: 57140 - RNA, 19 nt, Artificial Sequence
  Antisense Oligo
augagaaugacuguccaga

SEQ ID NO: 57141 - RNA, 19 nt, Artificial Sequence
  Sense Oligo
cuggacagucauucucaua

SEQ ID NO: 57142 - RNA, 19 nt, Artificial Sequence
  Antisense Oligo
uaugagaaugacuguccag

SEQ ID NO: 57143 - RNA, 19 nt, Artificial Sequence
  Sense Oligo
uggacagucauucucauau

SEQ ID NO: 57144 - RNA, 19 nt, Artificial Sequence
  Antisense Oligo
auaugagaaugacugucca

SEQ ID NO: 57145 - RNA, 19 nt, Artificial Sequence
  Sense Oligo
ggacagucauucucauauu

SEQ ID NO: 57146 - RNA, 19 nt, Artificial Sequence
  Antisense Oligo
aauaugagaaugacugucc

SEQ ID NO: 57147 - RNA, 19 nt, Artificial Sequence
  Sense Oligo
auucucauauuguggucag

SEQ ID NO: 57148 - RNA, 19 nt, Artificial Sequence
  Antisense Oligo
cugaccacaauaugagaau

SEQ ID NO: 57149 - RNA, 19 nt, Artificial Sequence
  Sense Oligo
uucucauauuguggucagg

SEQ ID NO: 57150 - RNA, 19 nt, Artificial Sequence
  Antisense Oligo
ccugaccacaauaugagaa

SEQ ID NO: 57151 - RNA, 19 nt, Artificial Sequence
  Sense Oligo
gaguuagcuuucccuuuuc

SEQ ID NO: 57152 - RNA, 19 nt, Artificial Sequence
  Antisense Oligo
gaaaagggaaagcuaacuc

SEQ ID NO: 57153 - RNA, 19 nt, Artificial Sequence
  Sense Oligo
aguuagcuuucccuuuuca

SEQ ID NO: 57154 - RNA, 19 nt, Artificial Sequence
  Antisense Oligo
ugaaaagggaaagcuaacu

SEQ ID NO: 57155 - RNA, 19 nt, Artificial Sequence
  Sense Oligo
auuagccaauguguguccu

SEQ ID NO: 57156 - RNA, 19 nt, Artificial Sequence
  Antisense Oligo
aggacacacauuggcuaau

SEQ ID NO: 57157 - RNA, 19 nt, Artificial Sequence
  Sense Oligo
uuagccaauguguguccug

SEQ ID NO: 57158 - RNA, 19 nt, Artificial Sequence
  Antisense Oligo
caggacacacauuggcuaa

SEQ ID NO: 57159 - RNA, 19 nt, Artificial Sequence
  Sense Oligo
uagccaauguguguccugu

SEQ ID NO: 57160 - RNA, 19 nt, Artificial Sequence
  Antisense Oligo
acaggacacacauuggcua

SEQ ID NO: 57161 - RNA, 19 nt, Artificial Sequence
  Sense Oligo
agccaauguguguccuguu

SEQ ID NO: 57162 - RNA, 19 nt, Artificial Sequence
  Antisense Oligo
aacaggacacacauuggcu

SEQ ID NO: 57163 - RNA, 19 nt, Artificial Sequence
  Sense Oligo
gccaauguguguccuguuc

SEQ ID NO: 57164 - RNA, 19 nt, Artificial Sequence
  Antisense Oligo
gaacaggacacacauuggc

SEQ ID NO: 57165 - RNA, 19 nt, Artificial Sequence
  Sense Oligo
ccaauguguguccuguucu

SEQ ID NO: 57166 - RNA, 19 nt, Artificial Sequence
  Antisense Oligo
agaacaggacacacauugg

SEQ ID NO: 57167 - RNA, 19 nt, Artificial Sequence
  Sense Oligo
uguguguccuguucucuuc

SEQ ID NO: 57168 - RNA, 19 nt, Artificial Sequence
  Antisense Oligo
gaagagaacaggacacaca

SEQ ID NO: 57169 - RNA, 19 nt, Artificial Sequence
  Sense Oligo
uguucucuucacagcuugu

SEQ ID NO: 57170 - RNA, 19 nt, Artificial Sequence
  Antisense Oligo
acaagcugugaagagaaca

SEQ ID NO: 57171 - RNA, 19 nt, Artificial Sequence
  Sense Oligo
guucucuucacagcuuguc

SEQ ID NO: 57172 - RNA, 19 nt, Artificial Sequence
  Antisense Oligo
gacaagcugugaagagaac

SEQ ID NO: 57173 - RNA, 19 nt, Artificial Sequence
  Sense Oligo
cucuucacagcuuguccca

SEQ ID NO: 57174 - RNA, 19 nt, Artificial Sequence
  Antisense Oligo
ugggacaagcugugaagag

SEQ ID NO: 57175 - RNA, 19 nt, Artificial Sequence
  Sense Oligo
cuucacagcuugucccaac

SEQ ID NO: 57176 - RNA, 19 nt, Artificial Sequence
  Antisense Oligo
guugggacaagcugugaag

SEQ ID NO: 57177 - RNA, 19 nt, Artificial Sequence
  Sense Oligo
uucacagcuugucccaacg

SEQ ID NO: 57178 - RNA, 19 nt, Artificial Sequence
  Antisense Oligo
cguugggacaagcugugaa

SEQ ID NO: 57179 - RNA, 19 nt, Artificial Sequence
  Sense Oligo
ucacagcuugucccaacgg

SEQ ID NO: 57180 - RNA, 19 nt, Artificial Sequence
  Antisense Oligo
ccguugggacaagcuguga

SEQ ID NO: 57181 - RNA, 19 nt, Artificial Sequence
  Sense Oligo
cacagcuugucccaacggc

SEQ ID NO: 57182 - RNA, 19 nt, Artificial Sequence
  Antisense Oligo
gccguugggacaagcugug

SEQ ID NO: 57183 - RNA, 19 nt, Artificial Sequence
  Sense Oligo
acagcuugucccaacggcc

SEQ ID NO: 57184 - RNA, 19 nt, Artificial Sequence
  Antisense Oligo
ggccguugggacaagcugu

SEQ ID NO: 57185 - RNA, 19 nt, Artificial Sequence
  Sense Oligo
cagcuugucccaacggcca

SEQ ID NO: 57186 - RNA, 19 nt, Artificial Sequence
  Antisense Oligo
uggccguugggacaagcug

SEQ ID NO: 57187 - RNA, 19 nt, Artificial Sequence
  Sense Oligo
agcuugucccaacggccau

SEQ ID NO: 57188 - RNA, 19 nt, Artificial Sequence
  Antisense Oligo
auggccguugggacaagcu

SEQ ID NO: 57189 - RNA, 19 nt, Artificial Sequence
  Sense Oligo
gcuugucccaacggccauc

SEQ ID NO: 57190 - RNA, 19 nt, Artificial Sequence
  Antisense Oligo
gauggccguugggacaagc

SEQ ID NO: 57191 - RNA, 19 nt, Artificial Sequence
  Sense Oligo
cuugucccaacggccaucc

SEQ ID NO: 57192 - RNA, 19 nt, Artificial Sequence
  Antisense Oligo
ggauggccguugggacaag

SEQ ID NO: 57193 - RNA, 19 nt, Artificial Sequence
  Sense Oligo
uugucccaacggccauccu

SEQ ID NO: 57194 - RNA, 19 nt, Artificial Sequence
  Antisense Oligo
aggauggccguugggacaa

SEQ ID NO: 57195 - RNA, 19 nt, Artificial Sequence
  Sense Oligo
ugucccaacggccauccuu

SEQ ID NO: 57196 - RNA, 19 nt, Artificial Sequence
  Antisense Oligo
aaggauggccguugggaca

SEQ ID NO: 57197 - RNA, 19 nt, Artificial Sequence
  Sense Oligo
gucccaacggccauccuug

SEQ ID NO: 57198 - RNA, 19 nt, Artificial Sequence
  Antisense Oligo
caaggauggccguugggac

SEQ ID NO: 57199 - RNA, 19 nt, Artificial Sequence
  Sense Oligo
caacggccauccuugcucc

SEQ ID NO: 57200 - RNA, 19 nt, Artificial Sequence
  Antisense Oligo
ggagcaaggauggccguug

SEQ ID NO: 57201 - RNA, 19 nt, Artificial Sequence
  Sense Oligo
aacggccauccuugcuccg

SEQ ID NO: 57202 - RNA, 19 nt, Artificial Sequence
  Antisense Oligo
cggagcaaggauggccguu

SEQ ID NO: 57203 - RNA, 19 nt, Artificial Sequence
  Sense Oligo
agaggugagucuugguauu

SEQ ID NO: 57204 - RNA, 19 nt, Artificial Sequence
  Antisense Oligo
aauaccaagacucaccucu

SEQ ID NO: 57205 - RNA, 19 nt, Artificial Sequence
  Sense Oligo
gaggugagucuugguauuu

SEQ ID NO: 57206 - RNA, 19 nt, Artificial Sequence
  Antisense Oligo
aaauaccaagacucaccuc

SEQ ID NO: 57207 - RNA, 19 nt, Artificial Sequence
  Sense Oligo
aggugagucuugguauuua

SEQ ID NO: 57208 - RNA, 19 nt, Artificial Sequence
  Antisense Oligo
uaaauaccaagacucaccu

SEQ ID NO: 57209 - RNA, 19 nt, Artificial Sequence
  Sense Oligo
ggugagucuugguauuuaa

SEQ ID NO: 57210 - RNA, 19 nt, Artificial Sequence
  Antisense Oligo
uuaaauaccaagacucacc

SEQ ID NO: 57211 - RNA, 19 nt, Artificial Sequence
  Sense Oligo
gugagucuugguauuuaag

SEQ ID NO: 57212 - RNA, 19 nt, Artificial Sequence
  Antisense Oligo
cuuaaauaccaagacucac

SEQ ID NO: 57213 - RNA, 19 nt, Artificial Sequence
  Sense Oligo
cuugguauuuaagauaggg

SEQ ID NO: 57214 - RNA, 19 nt, Artificial Sequence
  Antisense Oligo
cccuaucuuaaauaccaag

SEQ ID NO: 57215 - RNA, 19 nt, Artificial Sequence
  Sense Oligo
uugguauuuaagauagggu

SEQ ID NO: 57216 - RNA, 19 nt, Artificial Sequence
  Antisense Oligo
acccuaucuuaaauaccaa

SEQ ID NO: 57217 - RNA, 19 nt, Artificial Sequence
  Sense Oligo
ugguauuuaagauaggguu

SEQ ID NO: 57218 - RNA, 19 nt, Artificial Sequence
  Antisense Oligo
aacccuaucuuaaauacca

SEQ ID NO: 57219 - RNA, 19 nt, Artificial Sequence
  Sense Oligo
gguauuuaagauaggguuu

SEQ ID NO: 57220 - RNA, 19 nt, Artificial Sequence
  Antisense Oligo
aaacccuaucuuaaauacc

SEQ ID NO: 57221 - RNA, 19 nt, Artificial Sequence
  Sense Oligo
uggcgugcacuccuggguu

SEQ ID NO: 57222 - RNA, 19 nt, Artificial Sequence
  Antisense Oligo
aacccaggagugcacgcca

SEQ ID NO: 57223 - RNA, 19 nt, Artificial Sequence
  Sense Oligo
cgugcacuccuggguugga

SEQ ID NO: 57224 - RNA, 19 nt, Artificial Sequence
  Antisense Oligo
uccaacccaggagugcacg

SEQ ID NO: 57225 - RNA, 19 nt, Artificial Sequence
  Sense Oligo
agcacaggcucaccgagga

SEQ ID NO: 57226 - RNA, 19 nt, Artificial Sequence
  Antisense Oligo
uccucggugagccugugcu

SEQ ID NO: 57227 - RNA, 19 nt, Artificial Sequence
  Sense Oligo
cacaggcucaccgaggacu

SEQ ID NO: 57228 - RNA, 19 nt, Artificial Sequence
  Antisense Oligo
aguccucggugagccugug

SEQ ID NO: 57229 - RNA, 19 nt, Artificial Sequence
  Sense Oligo
acugcccagggugcucuga

SEQ ID NO: 57230 - RNA, 19 nt, Artificial Sequence
  Antisense Oligo
ucagagcacccugggcagu

SEQ ID NO: 57231 - RNA, 19 nt, Artificial Sequence
  Sense Oligo
gccaauggcgcuaaggguu

SEQ ID NO: 57232 - RNA, 19 nt, Artificial Sequence
  Antisense Oligo
aacccuuagcgccauuggc

SEQ ID NO: 57233 - RNA, 19 nt, Artificial Sequence
  Sense Oligo
ccaauggcgcuaaggguuu

SEQ ID NO: 57234 - RNA, 19 nt, Artificial Sequence
  Antisense Oligo
aaacccuuagcgccauugg

SEQ ID NO: 57235 - RNA, 19 nt, Artificial Sequence
  Sense Oligo
caauggcgcuaaggguuuc

SEQ ID NO: 57236 - RNA, 19 nt, Artificial Sequence
  Antisense Oligo
gaaacccuuagcgccauug

SEQ ID NO: 57237 - RNA, 19 nt, Artificial Sequence
  Sense Oligo
aauggcgcuaaggguuucu

SEQ ID NO: 57238 - RNA, 19 nt, Artificial Sequence
  Antisense Oligo
agaaacccuuagcgccauu

SEQ ID NO: 57239 - RNA, 19 nt, Artificial Sequence
  Sense Oligo
auggcgcuaaggguuucua

SEQ ID NO: 57240 - RNA, 19 nt, Artificial Sequence
  Antisense Oligo
uagaaacccuuagcgccau

SEQ ID NO: 57241 - RNA, 19 nt, Artificial Sequence
  Sense Oligo
uggcgcuaaggguuucuag

SEQ ID NO: 57242 - RNA, 19 nt, Artificial Sequence
  Antisense Oligo
cuagaaacccuuagcgcca

SEQ ID NO: 57243 - RNA, 19 nt, Artificial Sequence
  Sense Oligo
cuaaggguuucuagcccag

SEQ ID NO: 57244 - RNA, 19 nt, Artificial Sequence
  Antisense Oligo
cugggcuagaaacccuuag

SEQ ID NO: 57245 - RNA, 19 nt, Artificial Sequence
  Sense Oligo
uaaggguuucuagcccagg

SEQ ID NO: 57246 - RNA, 19 nt, Artificial Sequence
  Antisense Oligo
ccugggcuagaaacccuua

SEQ ID NO: 57247 - RNA, 19 nt, Artificial Sequence
  Sense Oligo
aaggguuucuagcccaggg

SEQ ID NO: 57248 - RNA, 19 nt, Artificial Sequence
  Antisense Oligo
cccugggcuagaaacccuu

SEQ ID NO: 57249 - RNA, 19 nt, Artificial Sequence
  Sense Oligo
aggguuucuagcccagggc

SEQ ID NO: 57250 - RNA, 19 nt, Artificial Sequence
  Antisense Oligo
gcccugggcuagaaacccu

SEQ ID NO: 57251 - RNA, 19 nt, Artificial Sequence
  Sense Oligo
gcccagggcuucucagacu

SEQ ID NO: 57252 - RNA, 19 nt, Artificial Sequence
  Antisense Oligo
agucugagaagcccugggc

SEQ ID NO: 57253 - RNA, 19 nt, Artificial Sequence
  Sense Oligo
cccagggcuucucagacuc

SEQ ID NO: 57254 - RNA, 19 nt, Artificial Sequence
  Antisense Oligo
gagucugagaagcccuggg

SEQ ID NO: 57255 - RNA, 19 nt, Artificial Sequence
  Sense Oligo
ccagggcuucucagacuca

SEQ ID NO: 57256 - RNA, 19 nt, Artificial Sequence
  Antisense Oligo
ugagucugagaagcccugg

SEQ ID NO: 57257 - RNA, 19 nt, Artificial Sequence
  Sense Oligo
cagacucagcacuguggac

SEQ ID NO: 57258 - RNA, 19 nt, Artificial Sequence
  Antisense Oligo
guccacagugcugagucug

SEQ ID NO: 57259 - RNA, 19 nt, Artificial Sequence
  Sense Oligo
agacucagcacuguggacg

SEQ ID NO: 57260 - RNA, 19 nt, Artificial Sequence
  Antisense Oligo
cguccacagugcugagucu

SEQ ID NO: 57261 - RNA, 19 nt, Artificial Sequence
  Sense Oligo
gacucagcacuguggacgu

SEQ ID NO: 57262 - RNA, 19 nt, Artificial Sequence
  Antisense Oligo
acguccacagugcugaguc

SEQ ID NO: 57263 - RNA, 19 nt, Artificial Sequence
  Sense Oligo
acucagcacuguggacgug

SEQ ID NO: 57264 - RNA, 19 nt, Artificial Sequence
  Antisense Oligo
cacguccacagugcugagu

SEQ ID NO: 57265 - RNA, 19 nt, Artificial Sequence
  Sense Oligo
cucagcacuguggacgugg

SEQ ID NO: 57266 - RNA, 19 nt, Artificial Sequence
  Antisense Oligo
ccacguccacagugcugag

SEQ ID NO: 57267 - RNA, 19 nt, Artificial Sequence
  Sense Oligo
ucagcacuguggacguggc

SEQ ID NO: 57268 - RNA, 19 nt, Artificial Sequence
  Antisense Oligo
gccacguccacagugcuga

SEQ ID NO: 57269 - RNA, 19 nt, Artificial Sequence
  Sense Oligo
cagcacuguggacguggcu

SEQ ID NO: 57270 - RNA, 19 nt, Artificial Sequence
  Antisense Oligo
agccacguccacagugcug

SEQ ID NO: 57271 - RNA, 19 nt, Artificial Sequence
  Sense Oligo
agcacuguggacguggcuc

SEQ ID NO: 57272 - RNA, 19 nt, Artificial Sequence
  Antisense Oligo
gagccacguccacagugcu

SEQ ID NO: 57273 - RNA, 19 nt, Artificial Sequence
  Sense Oligo
gcacuguggacguggcucu

SEQ ID NO: 57274 - RNA, 19 nt, Artificial Sequence
  Antisense Oligo
agagccacguccacagugc

SEQ ID NO: 57275 - RNA, 19 nt, Artificial Sequence
  Sense Oligo
cacuguggacguggcucug

SEQ ID NO: 57276 - RNA, 19 nt, Artificial Sequence
  Antisense Oligo
cagagccacguccacagug

SEQ ID NO: 57277 - RNA, 19 nt, Artificial Sequence
  Sense Oligo
ugugcacugcaggcugucu

SEQ ID NO: 57278 - RNA, 19 nt, Artificial Sequence
  Antisense Oligo
agacagccugcagugcaca

SEQ ID NO: 57279 - RNA, 19 nt, Artificial Sequence
  Sense Oligo
gugcacugcaggcugucug

SEQ ID NO: 57280 - RNA, 19 nt, Artificial Sequence
  Antisense Oligo
cagacagccugcagugcac

SEQ ID NO: 57281 - RNA, 19 nt, Artificial Sequence
  Sense Oligo
cacugcaggcugucuggca

SEQ ID NO: 57282 - RNA, 19 nt, Artificial Sequence
  Antisense Oligo
ugccagacagccugcagug

SEQ ID NO: 57283 - RNA, 19 nt, Artificial Sequence
  Sense Oligo
ugcaggcugucuggcagua

SEQ ID NO: 57284 - RNA, 19 nt, Artificial Sequence
  Antisense Oligo
uacugccagacagccugca

SEQ ID NO: 57285 - RNA, 19 nt, Artificial Sequence
  Sense Oligo
gcaggcugucuggcaguau

SEQ ID NO: 57286 - RNA, 19 nt, Artificial Sequence
  Antisense Oligo
auacugccagacagccugc

SEQ ID NO: 57287 - RNA, 19 nt, Artificial Sequence
  Sense Oligo
caggcugucuggcaguaug

SEQ ID NO: 57288 - RNA, 19 nt, Artificial Sequence
  Antisense Oligo
cauacugccagacagccug

SEQ ID NO: 57289 - RNA, 19 nt, Artificial Sequence
  Sense Oligo
aggcugucuggcaguaugc

SEQ ID NO: 57290 - RNA, 19 nt, Artificial Sequence
  Antisense Oligo
gcauacugccagacagccu

SEQ ID NO: 57291 - RNA, 19 nt, Artificial Sequence
  Sense Oligo
gcaguaugccugaccucga

SEQ ID NO: 57292 - RNA, 19 nt, Artificial Sequence
  Antisense Oligo
ucgaggucaggcauacugc

SEQ ID NO: 57293 - RNA, 19 nt, Artificial Sequence
  Sense Oligo
caguaugccugaccucgag

SEQ ID NO: 57294 - RNA, 19 nt, Artificial Sequence
  Antisense Oligo
cucgaggucaggcauacug

SEQ ID NO: 57295 - RNA, 19 nt, Artificial Sequence
  Sense Oligo
aguaugccugaccucgagu

SEQ ID NO: 57296 - RNA, 19 nt, Artificial Sequence
  Antisense Oligo
acucgaggucaggcauacu

SEQ ID NO: 57297 - RNA, 19 nt, Artificial Sequence
  Sense Oligo
guaugccugaccucgaguc

SEQ ID NO: 57298 - RNA, 19 nt, Artificial Sequence
  Antisense Oligo
gacucgaggucaggcauac

SEQ ID NO: 57299 - RNA, 19 nt, Artificial Sequence
  Sense Oligo
uaugccugaccucgagucc

SEQ ID NO: 57300 - RNA, 19 nt, Artificial Sequence
  Antisense Oligo
ggacucgaggucaggcaua

SEQ ID NO: 57301 - RNA, 19 nt, Artificial Sequence
  Sense Oligo
augccugaccucgaguccc

SEQ ID NO: 57302 - RNA, 19 nt, Artificial Sequence
  Antisense Oligo
gggacucgaggucaggcau

SEQ ID NO: 57303 - RNA, 19 nt, Artificial Sequence
  Sense Oligo
ugccugaccucgagucccu

SEQ ID NO: 57304 - RNA, 19 nt, Artificial Sequence
  Antisense Oligo
agggacucgaggucaggca

SEQ ID NO: 57305 - RNA, 19 nt, Artificial Sequence
  Sense Oligo
gaugccaggagcacccacu

SEQ ID NO: 57306 - RNA, 19 nt, Artificial Sequence
  Antisense Oligo
agugggugcuccuggcauc

SEQ ID NO: 57307 - RNA, 19 nt, Artificial Sequence
  Sense Oligo
augccaggagcacccacuc

SEQ ID NO: 57308 - RNA, 19 nt, Artificial Sequence
  Antisense Oligo
gagugggugcuccuggcau

SEQ ID NO: 57309 - RNA, 19 nt, Artificial Sequence
  Sense Oligo
ccucccagugugacagcua

SEQ ID NO: 57310 - RNA, 19 nt, Artificial Sequence
  Antisense Oligo
uagcugucacacugggagg

SEQ ID NO: 57311 - RNA, 19 nt, Artificial Sequence
  Sense Oligo
cugcuagccauucuuucua

SEQ ID NO: 57312 - RNA, 19 nt, Artificial Sequence
  Antisense Oligo
uagaaagaauggcuagcag

SEQ ID NO: 57313 - RNA, 19 nt, Artificial Sequence
  Sense Oligo
uagccauucuuucuagcca

SEQ ID NO: 57314 - RNA, 19 nt, Artificial Sequence
  Antisense Oligo
uggcuagaaagaauggcua

SEQ ID NO: 57315 - RNA, 19 nt, Artificial Sequence
  Sense Oligo
agccauucuuucuagccac

SEQ ID NO: 57316 - RNA, 19 nt, Artificial Sequence
  Antisense Oligo
guggcuagaaagaauggcu

SEQ ID NO: 57317 - RNA, 19 nt, Artificial Sequence
  Sense Oligo
gccauucuuucuagccacu

SEQ ID NO: 57318 - RNA, 19 nt, Artificial Sequence
  Antisense Oligo
aguggcuagaaagaauggc

SEQ ID NO: 57319 - RNA, 19 nt, Artificial Sequence
  Sense Oligo
uuucuagccacugcagcau

SEQ ID NO: 57320 - RNA, 19 nt, Artificial Sequence
  Antisense Oligo
augcugcaguggcuagaaa

SEQ ID NO: 57321 - RNA, 19 nt, Artificial Sequence
  Sense Oligo
uucuagccacugcagcaug

SEQ ID NO: 57322 - RNA, 19 nt, Artificial Sequence
  Antisense Oligo
caugcugcaguggcuagaa

SEQ ID NO: 57323 - RNA, 19 nt, Artificial Sequence
  Sense Oligo
ucuagccacugcagcaugg

SEQ ID NO: 57324 - RNA, 19 nt, Artificial Sequence
  Antisense Oligo
ccaugcugcaguggcuaga

SEQ ID NO: 57325 - RNA, 19 nt, Artificial Sequence
  Sense Oligo
cuagccacugcagcauggg

SEQ ID NO: 57326 - RNA, 19 nt, Artificial Sequence
  Antisense Oligo
cccaugcugcaguggcuag

SEQ ID NO: 57327 - RNA, 19 nt, Artificial Sequence
  Sense Oligo
gggucagugagccuugucu

SEQ ID NO: 57328 - RNA, 19 nt, Artificial Sequence
  Antisense Oligo
agacaaggcucacugaccc

SEQ ID NO: 57329 - RNA, 19 nt, Artificial Sequence
  Sense Oligo
ggucagugagccuugucuu

SEQ ID NO: 57330 - RNA, 19 nt, Artificial Sequence
  Antisense Oligo
aagacaaggcucacugacc

SEQ ID NO: 57331 - RNA, 19 nt, Artificial Sequence
  Sense Oligo
gucagugagccuugucuug

SEQ ID NO: 57332 - RNA, 19 nt, Artificial Sequence
  Antisense Oligo
caagacaaggcucacugac

SEQ ID NO: 57333 - RNA, 19 nt, Artificial Sequence
  Sense Oligo
ucagugagccuugucuuga

SEQ ID NO: 57334 - RNA, 19 nt, Artificial Sequence
  Antisense Oligo
ucaagacaaggcucacuga

SEQ ID NO: 57335 - RNA, 19 nt, Artificial Sequence
  Sense Oligo
cagugagccuugucuugau

SEQ ID NO: 57336 - RNA, 19 nt, Artificial Sequence
  Antisense Oligo
aucaagacaaggcucacug

SEQ ID NO: 57337 - RNA, 19 nt, Artificial Sequence
  Sense Oligo
agugagccuugucuugaua

SEQ ID NO: 57338 - RNA, 19 nt, Artificial Sequence
  Antisense Oligo
uaucaagacaaggcucacu

SEQ ID NO: 57339 - RNA, 19 nt, Artificial Sequence
  Sense Oligo
gugagccuugucuugauag

SEQ ID NO: 57340 - RNA, 19 nt, Artificial Sequence
  Antisense Oligo
cuaucaagacaaggcucac

SEQ ID NO: 57341 - RNA, 19 nt, Artificial Sequence
  Sense Oligo
ugagccuugucuugauaga

SEQ ID NO: 57342 - RNA, 19 nt, Artificial Sequence
  Antisense Oligo
ucuaucaagacaaggcuca

SEQ ID NO: 57343 - RNA, 19 nt, Artificial Sequence
  Sense Oligo
gagccuugucuugauagaa

SEQ ID NO: 57344 - RNA, 19 nt, Artificial Sequence
  Antisense Oligo
uucuaucaagacaaggcuc

SEQ ID NO: 57345 - RNA, 19 nt, Artificial Sequence
  Sense Oligo
agccuugucuugauagaau

SEQ ID NO: 57346 - RNA, 19 nt, Artificial Sequence
  Antisense Oligo
auucuaucaagacaaggcu

SEQ ID NO: 57347 - RNA, 19 nt, Artificial Sequence
  Sense Oligo
gccuugucuugauagaaug

SEQ ID NO: 57348 - RNA, 19 nt, Artificial Sequence
  Antisense Oligo
cauucuaucaagacaaggc

SEQ ID NO: 57349 - RNA, 19 nt, Artificial Sequence
  Sense Oligo
ccuugucuugauagaaugg

SEQ ID NO: 57350 - RNA, 19 nt, Artificial Sequence
  Antisense Oligo
ccauucuaucaagacaagg

SEQ ID NO: 57351 - RNA, 19 nt, Artificial Sequence
  Sense Oligo
cuugucuugauagaauggc

SEQ ID NO: 57352 - RNA, 19 nt, Artificial Sequence
  Antisense Oligo
gccauucuaucaagacaag

SEQ ID NO: 57353 - RNA, 19 nt, Artificial Sequence
  Sense Oligo
uugucuugauagaauggca

SEQ ID NO: 57354 - RNA, 19 nt, Artificial Sequence
  Antisense Oligo
ugccauucuaucaagacaa

SEQ ID NO: 57355 - RNA, 19 nt, Artificial Sequence
  Sense Oligo
ugucuugauagaauggcaa

SEQ ID NO: 57356 - RNA, 19 nt, Artificial Sequence
  Antisense Oligo
uugccauucuaucaagaca

SEQ ID NO: 57357 - RNA, 19 nt, Artificial Sequence
  Sense Oligo
uugauagaauggcaaggug

SEQ ID NO: 57358 - RNA, 19 nt, Artificial Sequence
  Antisense Oligo
caccuugccauucuaucaa

SEQ ID NO: 57359 - RNA, 19 nt, Artificial Sequence
  Sense Oligo
ugauagaauggcaaggugu

SEQ ID NO: 57360 - RNA, 19 nt, Artificial Sequence
  Antisense Oligo
acaccuugccauucuauca

SEQ ID NO: 57361 - RNA, 19 nt, Artificial Sequence
  Sense Oligo
gauagaauggcaagguguu

SEQ ID NO: 57362 - RNA, 19 nt, Artificial Sequence
  Antisense Oligo
aacaccuugccauucuauc

SEQ ID NO: 57363 - RNA, 19 nt, Artificial Sequence
  Sense Oligo
auagaauggcaagguguug

SEQ ID NO: 57364 - RNA, 19 nt, Artificial Sequence
  Antisense Oligo
caacaccuugccauucuau

SEQ ID NO: 57365 - RNA, 19 nt, Artificial Sequence
  Sense Oligo
aagguguugccuggaccac

SEQ ID NO: 57366 - RNA, 19 nt, Artificial Sequence
  Antisense Oligo
gugguccaggcaacaccuu

SEQ ID NO: 57367 - RNA, 19 nt, Artificial Sequence
  Sense Oligo
agguguugccuggaccaca

SEQ ID NO: 57368 - RNA, 19 nt, Artificial Sequence
  Antisense Oligo
ugugguccaggcaacaccu

SEQ ID NO: 57369 - RNA, 19 nt, Artificial Sequence
  Sense Oligo
accacaggcugcauuauua

SEQ ID NO: 57370 - RNA, 19 nt, Artificial Sequence
  Antisense Oligo
uaauaaugcagccuguggu

SEQ ID NO: 57371 - RNA, 19 nt, Artificial Sequence
  Sense Oligo
ccacaggcugcauuauuag

SEQ ID NO: 57372 - RNA, 19 nt, Artificial Sequence
  Antisense Oligo
cuaauaaugcagccugugg

SEQ ID NO: 57373 - RNA, 19 nt, Artificial Sequence
  Sense Oligo
cacaggcugcauuauuagc

SEQ ID NO: 57374 - RNA, 19 nt, Artificial Sequence
  Antisense Oligo
gcuaauaaugcagccugug

SEQ ID NO: 57375 - RNA, 19 nt, Artificial Sequence
  Sense Oligo
aggaggugugguccagaug

SEQ ID NO: 57376 - RNA, 19 nt, Artificial Sequence
  Antisense Oligo
caucuggaccacaccuccu

SEQ ID NO: 57377 - RNA, 19 nt, Artificial Sequence
  Sense Oligo
ggaggugugguccagaugc

SEQ ID NO: 57378 - RNA, 19 nt, Artificial Sequence
  Antisense Oligo
gcaucuggaccacaccucc

SEQ ID NO: 57379 - RNA, 19 nt, Artificial Sequence
  Sense Oligo
gaggugugguccagaugcc

SEQ ID NO: 57380 - RNA, 19 nt, Artificial Sequence
  Antisense Oligo
ggcaucuggaccacaccuc

SEQ ID NO: 57381 - RNA, 19 nt, Artificial Sequence
  Sense Oligo
aggugugguccagaugcca

SEQ ID NO: 57382 - RNA, 19 nt, Artificial Sequence
  Antisense Oligo
uggcaucuggaccacaccu

SEQ ID NO: 57383 - RNA, 19 nt, Artificial Sequence
  Sense Oligo
gguccagaugccaaaggaa

SEQ ID NO: 57384 - RNA, 19 nt, Artificial Sequence
  Antisense Oligo
uuccuuuggcaucuggacc

SEQ ID NO: 57385 - RNA, 19 nt, Artificial Sequence
  Sense Oligo
acguguaggcugugcgcca

SEQ ID NO: 57386 - RNA, 19 nt, Artificial Sequence
  Antisense Oligo
uggcgcacagccuacacgu

SEQ ID NO: 57387 - RNA, 19 nt, Artificial Sequence
  Sense Oligo
aacuguugauuauuccucu

SEQ ID NO: 57388 - RNA, 19 nt, Artificial Sequence
  Antisense Oligo
agaggaauaaucaacaguu

SEQ ID NO: 57389 - RNA, 19 nt, Artificial Sequence
  Sense Oligo
acuguugauuauuccucuc

SEQ ID NO: 57390 - RNA, 19 nt, Artificial Sequence
  Antisense Oligo
gagaggaauaaucaacagu

SEQ ID NO: 57391 - RNA, 19 nt, Artificial Sequence
  Sense Oligo
cuguugauuauuccucucu

SEQ ID NO: 57392 - RNA, 19 nt, Artificial Sequence
  Antisense Oligo
agagaggaauaaucaacag

SEQ ID NO: 57393 - RNA, 19 nt, Artificial Sequence
  Sense Oligo
uguugauuauuccucucug

SEQ ID NO: 57394 - RNA, 19 nt, Artificial Sequence
  Antisense Oligo
cagagaggaauaaucaaca

SEQ ID NO: 57395 - RNA, 19 nt, Artificial Sequence
  Sense Oligo
guugauuauuccucucugg

SEQ ID NO: 57396 - RNA, 19 nt, Artificial Sequence
  Antisense Oligo
ccagagaggaauaaucaac

SEQ ID NO: 57397 - RNA, 19 nt, Artificial Sequence
  Sense Oligo
uugauuauuccucucugga

SEQ ID NO: 57398 - RNA, 19 nt, Artificial Sequence
  Antisense Oligo
uccagagaggaauaaucaa

SEQ ID NO: 57399 - RNA, 19 nt, Artificial Sequence
  Sense Oligo
uuauuccucucuggauucc

SEQ ID NO: 57400 - RNA, 19 nt, Artificial Sequence
  Antisense Oligo
ggaauccagagaggaauaa

SEQ ID NO: 57401 - RNA, 19 nt, Artificial Sequence
  Sense Oligo
uauuccucucuggauuccc

SEQ ID NO: 57402 - RNA, 19 nt, Artificial Sequence
  Antisense Oligo
gggaauccagagaggaaua

SEQ ID NO: 57403 - RNA, 19 nt, Artificial Sequence
  Sense Oligo
uuccucucuggauucccaa

SEQ ID NO: 57404 - RNA, 19 nt, Artificial Sequence
  Antisense Oligo
uugggaauccagagaggaa

SEQ ID NO: 57405 - RNA, 19 nt, Artificial Sequence
  Sense Oligo
cucuggauucccaagcauc

SEQ ID NO: 57406 - RNA, 19 nt, Artificial Sequence
  Antisense Oligo
gaugcuugggaauccagag

SEQ ID NO: 57407 - RNA, 19 nt, Artificial Sequence
  Sense Oligo
ucuggauucccaagcaucu

SEQ ID NO: 57408 - RNA, 19 nt, Artificial Sequence
  Antisense Oligo
agaugcuugggaauccaga

SEQ ID NO: 57409 - RNA, 19 nt, Artificial Sequence
  Sense Oligo
cuggauucccaagcaucua

SEQ ID NO: 57410 - RNA, 19 nt, Artificial Sequence
  Antisense Oligo
uagaugcuugggaauccag

SEQ ID NO: 57411 - RNA, 19 nt, Artificial Sequence
  Sense Oligo
uggauucccaagcaucuag

SEQ ID NO: 57412 - RNA, 19 nt, Artificial Sequence
  Antisense Oligo
cuagaugcuugggaaucca

SEQ ID NO: 57413 - RNA, 19 nt, Artificial Sequence
  Sense Oligo
ggauucccaagcaucuagc

SEQ ID NO: 57414 - RNA, 19 nt, Artificial Sequence
  Antisense Oligo
gcuagaugcuugggaaucc

SEQ ID NO: 57415 - RNA, 19 nt, Artificial Sequence
  Sense Oligo
gauucccaagcaucuagcc

SEQ ID NO: 57416 - RNA, 19 nt, Artificial Sequence
  Antisense Oligo
ggcuagaugcuugggaauc

SEQ ID NO: 57417 - RNA, 19 nt, Artificial Sequence
  Sense Oligo
auucccaagcaucuagccu

SEQ ID NO: 57418 - RNA, 19 nt, Artificial Sequence
  Antisense Oligo
aggcuagaugcuugggaau

SEQ ID NO: 57419 - RNA, 19 nt, Artificial Sequence
  Sense Oligo
uucccaagcaucuagccua

SEQ ID NO: 57420 - RNA, 19 nt, Artificial Sequence
  Antisense Oligo
uaggcuagaugcuugggaa

SEQ ID NO: 57421 - RNA, 19 nt, Artificial Sequence
  Sense Oligo
guaucuguacuugcugagc

SEQ ID NO: 57422 - RNA, 19 nt, Artificial Sequence
  Antisense Oligo
gcucagcaaguacagauac

SEQ ID NO: 57423 - RNA, 19 nt, Artificial Sequence
  Sense Oligo
uaucuguacuugcugagca

SEQ ID NO: 57424 - RNA, 19 nt, Artificial Sequence
  Antisense Oligo
ugcucagcaaguacagaua

SEQ ID NO: 57425 - RNA, 19 nt, Artificial Sequence
  Sense Oligo
ugcugagcaagaggcuggu

SEQ ID NO: 57426 - RNA, 19 nt, Artificial Sequence
  Antisense Oligo
accagccucuugcucagca

SEQ ID NO: 57427 - RNA, 19 nt, Artificial Sequence
  Sense Oligo
cugagcaagaggcuggugg

SEQ ID NO: 57428 - RNA, 19 nt, Artificial Sequence
  Antisense Oligo
ccaccagccucuugcucag

SEQ ID NO: 57429 - RNA, 19 nt, Artificial Sequence
  Sense Oligo
ugagcaagaggcugguggg

SEQ ID NO: 57430 - RNA, 19 nt, Artificial Sequence
  Antisense Oligo
cccaccagccucuugcuca

SEQ ID NO: 57431 - RNA, 19 nt, Artificial Sequence
  Sense Oligo
gagcaagaggcuggugggu

SEQ ID NO: 57432 - RNA, 19 nt, Artificial Sequence
  Antisense Oligo
acccaccagccucuugcuc

SEQ ID NO: 57433 - RNA, 19 nt, Artificial Sequence
  Sense Oligo
agcaagaggcugguggguu

SEQ ID NO: 57434 - RNA, 19 nt, Artificial Sequence
  Antisense Oligo
aacccaccagccucuugcu

SEQ ID NO: 57435 - RNA, 19 nt, Artificial Sequence
  Sense Oligo
gcaagaggcugguggguug

SEQ ID NO: 57436 - RNA, 19 nt, Artificial Sequence
  Antisense Oligo
caacccaccagccucuugc

SEQ ID NO: 57437 - RNA, 19 nt, Artificial Sequence
  Sense Oligo
caagaggcugguggguuga

SEQ ID NO: 57438 - RNA, 19 nt, Artificial Sequence
  Antisense Oligo
ucaacccaccagccucuug

SEQ ID NO: 57439 - RNA, 19 nt, Artificial Sequence
  Sense Oligo
agaggcugguggguugagc

SEQ ID NO: 57440 - RNA, 19 nt, Artificial Sequence
  Antisense Oligo
gcucaacccaccagccucu

SEQ ID NO: 57441 - RNA, 19 nt, Artificial Sequence
  Sense Oligo
gaggcugguggguugagcu

SEQ ID NO: 57442 - RNA, 19 nt, Artificial Sequence
  Antisense Oligo
agcucaacccaccagccuc

SEQ ID NO: 57443 - RNA, 19 nt, Artificial Sequence
  Sense Oligo
aggcugguggguugagcug

SEQ ID NO: 57444 - RNA, 19 nt, Artificial Sequence
  Antisense Oligo
cagcucaacccaccagccu

SEQ ID NO: 57445 - RNA, 19 nt, Artificial Sequence
  Sense Oligo
ggcugguggguugagcuga

SEQ ID NO: 57446 - RNA, 19 nt, Artificial Sequence
  Antisense Oligo
ucagcucaacccaccagcc

SEQ ID NO: 57447 - RNA, 19 nt, Artificial Sequence
  Sense Oligo
gcugguggguugagcugac

SEQ ID NO: 57448 - RNA, 19 nt, Artificial Sequence
  Antisense Oligo
gucagcucaacccaccagc

SEQ ID NO: 57449 - RNA, 19 nt, Artificial Sequence
  Sense Oligo
cugguggguugagcugaca

SEQ ID NO: 57450 - RNA, 19 nt, Artificial Sequence
  Antisense Oligo
ugucagcucaacccaccag

SEQ ID NO: 57451 - RNA, 19 nt, Artificial Sequence
  Sense Oligo
ugguggguugagcugacac

SEQ ID NO: 57452 - RNA, 19 nt, Artificial Sequence
  Antisense Oligo
gugucagcucaacccacca

SEQ ID NO: 57453 - RNA, 19 nt, Artificial Sequence
  Sense Oligo
ggguugagcugacacgugg

SEQ ID NO: 57454 - RNA, 19 nt, Artificial Sequence
  Antisense Oligo
ccacgugucagcucaaccc

SEQ ID NO: 57455 - RNA, 19 nt, Artificial Sequence
  Sense Oligo
gguugagcugacacguggu

SEQ ID NO: 57456 - RNA, 19 nt, Artificial Sequence
  Antisense Oligo
accacgugucagcucaacc

SEQ ID NO: 57457 - RNA, 19 nt, Artificial Sequence
  Sense Oligo
guugagcugacacguggua

SEQ ID NO: 57458 - RNA, 19 nt, Artificial Sequence
  Antisense Oligo
uaccacgugucagcucaac

SEQ ID NO: 57459 - RNA, 19 nt, Artificial Sequence
  Sense Oligo
uugagcugacacgugguag

SEQ ID NO: 57460 - RNA, 19 nt, Artificial Sequence
  Antisense Oligo
cuaccacgugucagcucaa

SEQ ID NO: 57461 - RNA, 19 nt, Artificial Sequence
  Sense Oligo
ugagcugacacgugguagu

SEQ ID NO: 57462 - RNA, 19 nt, Artificial Sequence
  Antisense Oligo
acuaccacgugucagcuca

SEQ ID NO: 57463 - RNA, 19 nt, Artificial Sequence
  Sense Oligo
gagcugacacgugguaguu

SEQ ID NO: 57464 - RNA, 19 nt, Artificial Sequence
  Antisense Oligo
aacuaccacgugucagcuc

SEQ ID NO: 57465 - RNA, 19 nt, Artificial Sequence
  Sense Oligo
agcugacacgugguaguua

SEQ ID NO: 57466 - RNA, 19 nt, Artificial Sequence
  Antisense Oligo
uaacuaccacgugucagcu

SEQ ID NO: 57467 - RNA, 19 nt, Artificial Sequence
  Sense Oligo
gcugacacgugguaguuag

SEQ ID NO: 57468 - RNA, 19 nt, Artificial Sequence
  Antisense Oligo
cuaacuaccacgugucagc

SEQ ID NO: 57469 - RNA, 19 nt, Artificial Sequence
  Sense Oligo
cugacacgugguaguuagu

SEQ ID NO: 57470 - RNA, 19 nt, Artificial Sequence
  Antisense Oligo
acuaacuaccacgugucag

SEQ ID NO: 57471 - RNA, 19 nt, Artificial Sequence
  Sense Oligo
ugacacgugguaguuaguu

SEQ ID NO: 57472 - RNA, 19 nt, Artificial Sequence
  Antisense Oligo
aacuaacuaccacguguca

SEQ ID NO: 57473 - RNA, 19 nt, Artificial Sequence
  Sense Oligo
gacacgugguaguuaguua

SEQ ID NO: 57474 - RNA, 19 nt, Artificial Sequence
  Antisense Oligo
uaacuaacuaccacguguc

SEQ ID NO: 57475 - RNA, 19 nt, Artificial Sequence
  Sense Oligo
acacgugguaguuaguuau

SEQ ID NO: 57476 - RNA, 19 nt, Artificial Sequence
  Antisense Oligo
auaacuaacuaccacgugu

SEQ ID NO: 57477 - RNA, 19 nt, Artificial Sequence
  Sense Oligo
cacgugguaguuaguuauu

SEQ ID NO: 57478 - RNA, 19 nt, Artificial Sequence
  Antisense Oligo
aauaacuaacuaccacgug

SEQ ID NO: 57479 - RNA, 19 nt, Artificial Sequence
  Sense Oligo
acgugguaguuaguuauua

SEQ ID NO: 57480 - RNA, 19 nt, Artificial Sequence
  Antisense Oligo
uaauaacuaacuaccacgu

SEQ ID NO: 57481 - RNA, 19 nt, Artificial Sequence
  Sense Oligo
cgugguaguuaguuauuag

SEQ ID NO: 57482 - RNA, 19 nt, Artificial Sequence
  Antisense Oligo
cuaauaacuaacuaccacg

SEQ ID NO: 57483 - RNA, 19 nt, Artificial Sequence
  Sense Oligo
gugguaguuaguuauuagu

SEQ ID NO: 57484 - RNA, 19 nt, Artificial Sequence
  Antisense Oligo
acuaauaacuaacuaccac

SEQ ID NO: 57485 - RNA, 19 nt, Artificial Sequence
  Sense Oligo
guauuacuuacuugguuga

SEQ ID NO: 57486 - RNA, 19 nt, Artificial Sequence
  Antisense Oligo
ucaaccaaguaaguaauac

SEQ ID NO: 57487 - RNA, 19 nt, Artificial Sequence
  Sense Oligo
uauuacuuacuugguugag

SEQ ID NO: 57488 - RNA, 19 nt, Artificial Sequence
  Antisense Oligo
cucaaccaaguaaguaaua

SEQ ID NO: 57489 - RNA, 19 nt, Artificial Sequence
  Sense Oligo
agauaugucuggcucucuu

SEQ ID NO: 57490 - RNA, 19 nt, Artificial Sequence
  Antisense Oligo
aagagagccagacauaucu

SEQ ID NO: 57491 - RNA, 19 nt, Artificial Sequence
  Sense Oligo
gauaugucuggcucucuua

SEQ ID NO: 57492 - RNA, 19 nt, Artificial Sequence
  Antisense Oligo
uaagagagccagacauauc

SEQ ID NO: 57493 - RNA, 19 nt, Artificial Sequence
  Sense Oligo
auaugucuggcucucuuac

SEQ ID NO: 57494 - RNA, 19 nt, Artificial Sequence
  Antisense Oligo
guaagagagccagacauau

SEQ ID NO: 57495 - RNA, 19 nt, Artificial Sequence
  Sense Oligo
uaugucuggcucucuuacc

SEQ ID NO: 57496 - RNA, 19 nt, Artificial Sequence
  Antisense Oligo
gguaagagagccagacaua

SEQ ID NO: 57497 - RNA, 19 nt, Artificial Sequence
  Sense Oligo
augucuggcucucuuaccc

SEQ ID NO: 57498 - RNA, 19 nt, Artificial Sequence
  Antisense Oligo
ggguaagagagccagacau

SEQ ID NO: 57499 - RNA, 19 nt, Artificial Sequence
  Sense Oligo
uuacccaggcuggagugca

SEQ ID NO: 57500 - RNA, 19 nt, Artificial Sequence
  Antisense Oligo
ugcacuccagccuggguaa

SEQ ID NO: 57501 - RNA, 19 nt, Artificial Sequence
  Sense Oligo
ccaggcuggagugcagagu

SEQ ID NO: 57502 - RNA, 19 nt, Artificial Sequence
  Antisense Oligo
acucugcacuccagccugg

SEQ ID NO: 57503 - RNA, 19 nt, Artificial Sequence
  Sense Oligo
caggcuggagugcagagug

SEQ ID NO: 57504 - RNA, 19 nt, Artificial Sequence
  Antisense Oligo
cacucugcacuccagccug

SEQ ID NO: 57505 - RNA, 19 nt, Artificial Sequence
  Sense Oligo
aggcuggagugcagaguga

SEQ ID NO: 57506 - RNA, 19 nt, Artificial Sequence
  Antisense Oligo
ucacucugcacuccagccu

SEQ ID NO: 57507 - RNA, 19 nt, Artificial Sequence
  Sense Oligo
ggagugcagagugacauga

SEQ ID NO: 57508 - RNA, 19 nt, Artificial Sequence
  Antisense Oligo
ucaugucacucugcacucc

SEQ ID NO: 57509 - RNA, 19 nt, Artificial Sequence
  Sense Oligo
gugcagagugacaugauca

SEQ ID NO: 57510 - RNA, 19 nt, Artificial Sequence
  Antisense Oligo
ugaucaugucacucugcac

SEQ ID NO: 57511 - RNA, 19 nt, Artificial Sequence
  Sense Oligo
ugcagagugacaugaucau

SEQ ID NO: 57512 - RNA, 19 nt, Artificial Sequence
  Antisense Oligo
augaucaugucacucugca

SEQ ID NO: 57513 - RNA, 19 nt, Artificial Sequence
  Sense Oligo
gcagagugacaugaucaua

SEQ ID NO: 57514 - RNA, 19 nt, Artificial Sequence
  Antisense Oligo
uaugaucaugucacucugc

SEQ ID NO: 57515 - RNA, 19 nt, Artificial Sequence
  Sense Oligo
aacuccugggcucaagcga

SEQ ID NO: 57516 - RNA, 19 nt, Artificial Sequence
  Antisense Oligo
ucgcuugagcccaggaguu

SEQ ID NO: 57517 - RNA, 19 nt, Artificial Sequence
  Sense Oligo
acuccugggcucaagcgau

SEQ ID NO: 57518 - RNA, 19 nt, Artificial Sequence
  Antisense Oligo
aucgcuugagcccaggagu

SEQ ID NO: 57519 - RNA, 19 nt, Artificial Sequence
  Sense Oligo
cuccugggcucaagcgauc

SEQ ID NO: 57520 - RNA, 19 nt, Artificial Sequence
  Antisense Oligo
gaucgcuugagcccaggag

SEQ ID NO: 57521 - RNA, 19 nt, Artificial Sequence
  Sense Oligo
uccugggcucaagcgaucc

SEQ ID NO: 57522 - RNA, 19 nt, Artificial Sequence
  Antisense Oligo
ggaucgcuugagcccagga

SEQ ID NO: 57523 - RNA, 19 nt, Artificial Sequence
  Sense Oligo
ccugggcucaagcgauccu

SEQ ID NO: 57524 - RNA, 19 nt, Artificial Sequence
  Antisense Oligo
aggaucgcuugagcccagg

SEQ ID NO: 57525 - RNA, 19 nt, Artificial Sequence
  Sense Oligo
cugggcucaagcgauccuc

SEQ ID NO: 57526 - RNA, 19 nt, Artificial Sequence
  Antisense Oligo
gaggaucgcuugagcccag

SEQ ID NO: 57527 - RNA, 19 nt, Artificial Sequence
  Sense Oligo
ccucggccucccaaagugu

SEQ ID NO: 57528 - RNA, 19 nt, Artificial Sequence
  Antisense Oligo
acacuuugggaggccgagg

SEQ ID NO: 57529 - RNA, 19 nt, Artificial Sequence
  Sense Oligo
caaaguguugggauuauga

SEQ ID NO: 57530 - RNA, 19 nt, Artificial Sequence
  Antisense Oligo
ucauaaucccaacacuuug

SEQ ID NO: 57531 - RNA, 19 nt, Artificial Sequence
  Sense Oligo
aaaguguugggauuaugag

SEQ ID NO: 57532 - RNA, 19 nt, Artificial Sequence
  Antisense Oligo
cucauaaucccaacacuuu

SEQ ID NO: 57533 - RNA, 19 nt, Artificial Sequence
  Sense Oligo
gcccagccugauacacguc

SEQ ID NO: 57534 - RNA, 19 nt, Artificial Sequence
  Antisense Oligo
gacguguaucaggcugggc

SEQ ID NO: 57535 - RNA, 19 nt, Artificial Sequence
  Sense Oligo
cccagccugauacacguca

SEQ ID NO: 57536 - RNA, 19 nt, Artificial Sequence
  Antisense Oligo
ugacguguaucaggcuggg

SEQ ID NO: 57537 - RNA, 19 nt, Artificial Sequence
  Sense Oligo
ccagccugauacacgucau

SEQ ID NO: 57538 - RNA, 19 nt, Artificial Sequence
  Antisense Oligo
augacguguaucaggcugg

SEQ ID NO: 57539 - RNA, 19 nt, Artificial Sequence
  Sense Oligo
cagccugauacacgucauu

SEQ ID NO: 57540 - RNA, 19 nt, Artificial Sequence
  Antisense Oligo
aaugacguguaucaggcug

SEQ ID NO: 57541 - RNA, 19 nt, Artificial Sequence
  Sense Oligo
agccugauacacgucauuu

SEQ ID NO: 57542 - RNA, 19 nt, Artificial Sequence
  Antisense Oligo
aaaugacguguaucaggcu

SEQ ID NO: 57543 - RNA, 19 nt, Artificial Sequence
  Sense Oligo
gccugauacacgucauuua

SEQ ID NO: 57544 - RNA, 19 nt, Artificial Sequence
  Antisense Oligo
uaaaugacguguaucaggc

SEQ ID NO: 57545 - RNA, 19 nt, Artificial Sequence
  Sense Oligo
ccugauacacgucauuuaa

SEQ ID NO: 57546 - RNA, 19 nt, Artificial Sequence
  Antisense Oligo
uuaaaugacguguaucagg

SEQ ID NO: 57547 - RNA, 19 nt, Artificial Sequence
  Sense Oligo
cugauacacgucauuuaau

SEQ ID NO: 57548 - RNA, 19 nt, Artificial Sequence
  Antisense Oligo
auuaaaugacguguaucag

SEQ ID NO: 57549 - RNA, 19 nt, Artificial Sequence
  Sense Oligo
aacuguuacauacacuuca

SEQ ID NO: 57550 - RNA, 19 nt, Artificial Sequence
  Antisense Oligo
ugaaguguauguaacaguu

SEQ ID NO: 57551 - RNA, 19 nt, Artificial Sequence
  Sense Oligo
acuguuacauacacuucau

SEQ ID NO: 57552 - RNA, 19 nt, Artificial Sequence
  Antisense Oligo
augaaguguauguaacagu

SEQ ID NO: 57553 - RNA, 19 nt, Artificial Sequence
  Sense Oligo
cuguuacauacacuucauu

SEQ ID NO: 57554 - RNA, 19 nt, Artificial Sequence
  Antisense Oligo
aaugaaguguauguaacag

SEQ ID NO: 57555 - RNA, 19 nt, Artificial Sequence
  Sense Oligo
uuuucugagcuucaaucac

SEQ ID NO: 57556 - RNA, 19 nt, Artificial Sequence
  Antisense Oligo
gugauugaagcucagaaaa

SEQ ID NO: 57557 - RNA, 19 nt, Artificial Sequence
  Sense Oligo
uuucugagcuucaaucacu

SEQ ID NO: 57558 - RNA, 19 nt, Artificial Sequence
  Antisense Oligo
agugauugaagcucagaaa

SEQ ID NO: 57559 - RNA, 19 nt, Artificial Sequence
  Sense Oligo
uucugagcuucaaucacuu

SEQ ID NO: 57560 - RNA, 19 nt, Artificial Sequence
  Antisense Oligo
aagugauugaagcucagaa

SEQ ID NO: 57561 - RNA, 19 nt, Artificial Sequence
  Sense Oligo
ucugagcuucaaucacuuc

SEQ ID NO: 57562 - RNA, 19 nt, Artificial Sequence
  Antisense Oligo
gaagugauugaagcucaga

SEQ ID NO: 57563 - RNA, 19 nt, Artificial Sequence
  Sense Oligo
cugagcuucaaucacuucc

SEQ ID NO: 57564 - RNA, 19 nt, Artificial Sequence
  Antisense Oligo
ggaagugauugaagcucag

SEQ ID NO: 57565 - RNA, 19 nt, Artificial Sequence
  Sense Oligo
gagcuucaaucacuuccuu

SEQ ID NO: 57566 - RNA, 19 nt, Artificial Sequence
  Antisense Oligo
aaggaagugauugaagcuc

SEQ ID NO: 57567 - RNA, 19 nt, Artificial Sequence
  Sense Oligo
agcuucaaucacuuccuug

SEQ ID NO: 57568 - RNA, 19 nt, Artificial Sequence
  Antisense Oligo
caaggaagugauugaagcu

SEQ ID NO: 57569 - RNA, 19 nt, Artificial Sequence
  Sense Oligo
gcuucaaucacuuccuugu

SEQ ID NO: 57570 - RNA, 19 nt, Artificial Sequence
  Antisense Oligo
acaaggaagugauugaagc

SEQ ID NO: 57571 - RNA, 19 nt, Artificial Sequence
  Sense Oligo
cuucaaucacuuccuuguc

SEQ ID NO: 57572 - RNA, 19 nt, Artificial Sequence
  Antisense Oligo
gacaaggaagugauugaag

SEQ ID NO: 57573 - RNA, 19 nt, Artificial Sequence
  Sense Oligo
uucaaucacuuccuugucc

SEQ ID NO: 57574 - RNA, 19 nt, Artificial Sequence
  Antisense Oligo
ggacaaggaagugauugaa

SEQ ID NO: 57575 - RNA, 19 nt, Artificial Sequence
  Sense Oligo
ucaaucacuuccuugucca

SEQ ID NO: 57576 - RNA, 19 nt, Artificial Sequence
  Antisense Oligo
uggacaaggaagugauuga

SEQ ID NO: 57577 - RNA, 19 nt, Artificial Sequence
  Sense Oligo
caaucacuuccuuguccau

SEQ ID NO: 57578 - RNA, 19 nt, Artificial Sequence
  Antisense Oligo
auggacaaggaagugauug

SEQ ID NO: 57579 - RNA, 19 nt, Artificial Sequence
  Sense Oligo
uagagucuauccaagaaug

SEQ ID NO: 57580 - RNA, 19 nt, Artificial Sequence
  Antisense Oligo
cauucuuggauagacucua

SEQ ID NO: 57581 - RNA, 19 nt, Artificial Sequence
  Sense Oligo
agagucuauccaagaaugc

SEQ ID NO: 57582 - RNA, 19 nt, Artificial Sequence
  Antisense Oligo
gcauucuuggauagacucu

SEQ ID NO: 57583 - RNA, 19 nt, Artificial Sequence
  Sense Oligo
gagucuauccaagaaugcu

SEQ ID NO: 57584 - RNA, 19 nt, Artificial Sequence
  Antisense Oligo
agcauucuuggauagacuc

SEQ ID NO: 57585 - RNA, 19 nt, Artificial Sequence
  Sense Oligo
gucuauccaagaaugcucc

SEQ ID NO: 57586 - RNA, 19 nt, Artificial Sequence
  Antisense Oligo
ggagcauucuuggauagac

SEQ ID NO: 57587 - RNA, 19 nt, Artificial Sequence
  Sense Oligo
ucuauccaagaaugcuccc

SEQ ID NO: 57588 - RNA, 19 nt, Artificial Sequence
  Antisense Oligo
gggagcauucuuggauaga

SEQ ID NO: 57589 - RNA, 19 nt, Artificial Sequence
  Sense Oligo
ccaagaaugcucccagcuc

SEQ ID NO: 57590 - RNA, 19 nt, Artificial Sequence
  Antisense Oligo
gagcugggagcauucuugg

SEQ ID NO: 57591 - RNA, 19 nt, Artificial Sequence
  Sense Oligo
agaaugcucccagcucuga

SEQ ID NO: 57592 - RNA, 19 nt, Artificial Sequence
  Antisense Oligo
ucagagcugggagcauucu

SEQ ID NO: 57593 - RNA, 19 nt, Artificial Sequence
  Sense Oligo
gaaugcucccagcucugaa

SEQ ID NO: 57594 - RNA, 19 nt, Artificial Sequence
  Antisense Oligo
uucagagcugggagcauuc

SEQ ID NO: 57595 - RNA, 19 nt, Artificial Sequence
  Sense Oligo
acucucaguauauuguggc

SEQ ID NO: 57596 - RNA, 19 nt, Artificial Sequence
  Antisense Oligo
gccacaauauacugagagu

SEQ ID NO: 57597 - RNA, 19 nt, Artificial Sequence
  Sense Oligo
cucucaguauauuguggca

SEQ ID NO: 57598 - RNA, 19 nt, Artificial Sequence
  Antisense Oligo
ugccacaauauacugagag

SEQ ID NO: 57599 - RNA, 19 nt, Artificial Sequence
  Sense Oligo
ucucaguauauuguggcac

SEQ ID NO: 57600 - RNA, 19 nt, Artificial Sequence
  Antisense Oligo
gugccacaauauacugaga

SEQ ID NO: 57601 - RNA, 19 nt, Artificial Sequence
  Sense Oligo
cucaguauauuguggcaca

SEQ ID NO: 57602 - RNA, 19 nt, Artificial Sequence
  Antisense Oligo
ugugccacaauauacugag

SEQ ID NO: 57603 - RNA, 19 nt, Artificial Sequence
  Sense Oligo
aauaagccuuuggaaguag

SEQ ID NO: 57604 - RNA, 19 nt, Artificial Sequence
  Antisense Oligo
cuacuuccaaaggcuuauu

SEQ ID NO: 57605 - RNA, 19 nt, Artificial Sequence
  Sense Oligo
auaagccuuuggaaguaga

SEQ ID NO: 57606 - RNA, 19 nt, Artificial Sequence
  Antisense Oligo
ucuacuuccaaaggcuuau

SEQ ID NO: 57607 - RNA, 19 nt, Artificial Sequence
  Sense Oligo
uaagccuuuggaaguagau

SEQ ID NO: 57608 - RNA, 19 nt, Artificial Sequence
  Antisense Oligo
aucuacuuccaaaggcuua

SEQ ID NO: 57609 - RNA, 19 nt, Artificial Sequence
  Sense Oligo
aagccuuuggaaguagauu

SEQ ID NO: 57610 - RNA, 19 nt, Artificial Sequence
  Antisense Oligo
aaucuacuuccaaaggcuu

SEQ ID NO: 57611 - RNA, 19 nt, Artificial Sequence
  Sense Oligo
agccuuuggaaguagauua

SEQ ID NO: 57612 - RNA, 19 nt, Artificial Sequence
  Antisense Oligo
uaaucuacuuccaaaggcu

SEQ ID NO: 57613 - RNA, 19 nt, Artificial Sequence
  Sense Oligo
gccuuuggaaguagauuau

SEQ ID NO: 57614 - RNA, 19 nt, Artificial Sequence
  Antisense Oligo
auaaucuacuuccaaaggc

SEQ ID NO: 57615 - RNA, 19 nt, Artificial Sequence
  Sense Oligo
ccuuuggaaguagauuaug

SEQ ID NO: 57616 - RNA, 19 nt, Artificial Sequence
  Antisense Oligo
cauaaucuacuuccaaagg

SEQ ID NO: 57617 - RNA, 19 nt, Artificial Sequence
  Sense Oligo
cuuuggaaguagauuaugu

SEQ ID NO: 57618 - RNA, 19 nt, Artificial Sequence
  Antisense Oligo
acauaaucuacuuccaaag

SEQ ID NO: 57619 - RNA, 19 nt, Artificial Sequence
  Sense Oligo
uuuggaaguagauuaugug

SEQ ID NO: 57620 - RNA, 19 nt, Artificial Sequence
  Antisense Oligo
cacauaaucuacuuccaaa

SEQ ID NO: 57621 - RNA, 19 nt, Artificial Sequence
  Sense Oligo
aaaaguccaagccaggugu

SEQ ID NO: 57622 - RNA, 19 nt, Artificial Sequence
  Antisense Oligo
acaccuggcuuggacuuuu

SEQ ID NO: 57623 - RNA, 19 nt, Artificial Sequence
  Sense Oligo
aaaguccaagccaggugug

SEQ ID NO: 57624 - RNA, 19 nt, Artificial Sequence
  Antisense Oligo
cacaccuggcuuggacuuu

SEQ ID NO: 57625 - RNA, 19 nt, Artificial Sequence
  Sense Oligo
aaguccaagccaggugugg

SEQ ID NO: 57626 - RNA, 19 nt, Artificial Sequence
  Antisense Oligo
ccacaccuggcuuggacuu

SEQ ID NO: 57627 - RNA, 19 nt, Artificial Sequence
  Sense Oligo
ccaagccaggugugguagg

SEQ ID NO: 57628 - RNA, 19 nt, Artificial Sequence
  Antisense Oligo
ccuaccacaccuggcuugg

SEQ ID NO: 57629 - RNA, 19 nt, Artificial Sequence
  Sense Oligo
acaccuguaaucccagcac

SEQ ID NO: 57630 - RNA, 19 nt, Artificial Sequence
  Antisense Oligo
gugcugggauuacaggugu

SEQ ID NO: 57631 - RNA, 19 nt, Artificial Sequence
  Sense Oligo
uguaaucccagcacuucag

SEQ ID NO: 57632 - RNA, 19 nt, Artificial Sequence
  Antisense Oligo
cugaagugcugggauuaca

SEQ ID NO: 57633 - RNA, 19 nt, Artificial Sequence
  Sense Oligo
guaaucccagcacuucagg

SEQ ID NO: 57634 - RNA, 19 nt, Artificial Sequence
  Antisense Oligo
ccugaagugcugggauuac

SEQ ID NO: 57635 - RNA, 19 nt, Artificial Sequence
  Sense Oligo
gaggcugaggcagguggau

SEQ ID NO: 57636 - RNA, 19 nt, Artificial Sequence
  Antisense Oligo
auccaccugccucagccuc

SEQ ID NO: 57637 - RNA, 19 nt, Artificial Sequence
  Sense Oligo
aggcugaggcagguggauu

SEQ ID NO: 57638 - RNA, 19 nt, Artificial Sequence
  Antisense Oligo
aauccaccugccucagccu

SEQ ID NO: 57639 - RNA, 19 nt, Artificial Sequence
  Sense Oligo
ggcugaggcagguggauug

SEQ ID NO: 57640 - RNA, 19 nt, Artificial Sequence
  Antisense Oligo
caauccaccugccucagcc

SEQ ID NO: 57641 - RNA, 19 nt, Artificial Sequence
  Sense Oligo
gcugaggcagguggauugc

SEQ ID NO: 57642 - RNA, 19 nt, Artificial Sequence
  Antisense Oligo
gcaauccaccugccucagc

SEQ ID NO: 57643 - RNA, 19 nt, Artificial Sequence
  Sense Oligo
cugaggcagguggauugcu

SEQ ID NO: 57644 - RNA, 19 nt, Artificial Sequence
  Antisense Oligo
agcaauccaccugccucag

SEQ ID NO: 57645 - RNA, 19 nt, Artificial Sequence
  Sense Oligo
ugaggcagguggauugcua

SEQ ID NO: 57646 - RNA, 19 nt, Artificial Sequence
  Antisense Oligo
uagcaauccaccugccuca

SEQ ID NO: 57647 - RNA, 19 nt, Artificial Sequence
  Sense Oligo
uugcuagaucccaggaguu

SEQ ID NO: 57648 - RNA, 19 nt, Artificial Sequence
  Antisense Oligo
aacuccugggaucuagcaa

SEQ ID NO: 57649 - RNA, 19 nt, Artificial Sequence
  Sense Oligo
ugcuagaucccaggaguuu

SEQ ID NO: 57650 - RNA, 19 nt, Artificial Sequence
  Antisense Oligo
aaacuccugggaucuagca

SEQ ID NO: 57651 - RNA, 19 nt, Artificial Sequence
  Sense Oligo
cuagaucccaggaguuuga

SEQ ID NO: 57652 - RNA, 19 nt, Artificial Sequence
  Antisense Oligo
ucaaacuccugggaucuag

SEQ ID NO: 57653 - RNA, 19 nt, Artificial Sequence
  Sense Oligo
aagcaucagcagggcaugg

SEQ ID NO: 57654 - RNA, 19 nt, Artificial Sequence
  Antisense Oligo
ccaugcccugcugaugcuu

SEQ ID NO: 57655 - RNA, 19 nt, Artificial Sequence
  Sense Oligo
agcaucagcagggcauggu

SEQ ID NO: 57656 - RNA, 19 nt, Artificial Sequence
  Antisense Oligo
accaugcccugcugaugcu

SEQ ID NO: 57657 - RNA, 19 nt, Artificial Sequence
  Sense Oligo
gcaucagcagggcauggug

SEQ ID NO: 57658 - RNA, 19 nt, Artificial Sequence
  Antisense Oligo
caccaugcccugcugaugc

SEQ ID NO: 57659 - RNA, 19 nt, Artificial Sequence
  Sense Oligo
ccagcuacuugggaggcua

SEQ ID NO: 57660 - RNA, 19 nt, Artificial Sequence
  Antisense Oligo
uagccucccaaguagcugg

SEQ ID NO: 57661 - RNA, 19 nt, Artificial Sequence
  Sense Oligo
cagcuacuugggaggcuaa

SEQ ID NO: 57662 - RNA, 19 nt, Artificial Sequence
  Antisense Oligo
uuagccucccaaguagcug

SEQ ID NO: 57663 - RNA, 19 nt, Artificial Sequence
  Sense Oligo
agcuacuugggaggcuaag

SEQ ID NO: 57664 - RNA, 19 nt, Artificial Sequence
  Antisense Oligo
cuuagccucccaaguagcu

SEQ ID NO: 57665 - RNA, 19 nt, Artificial Sequence
  Sense Oligo
gcuacuugggaggcuaagg

SEQ ID NO: 57666 - RNA, 19 nt, Artificial Sequence
  Antisense Oligo
ccuuagccucccaaguagc

SEQ ID NO: 57667 - RNA, 19 nt, Artificial Sequence
  Sense Oligo
cuacuugggaggcuaaggu

SEQ ID NO: 57668 - RNA, 19 nt, Artificial Sequence
  Antisense Oligo
accuuagccucccaaguag

SEQ ID NO: 57669 - RNA, 19 nt, Artificial Sequence
  Sense Oligo
aagguaggaggauugcuug

SEQ ID NO: 57670 - RNA, 19 nt, Artificial Sequence
  Antisense Oligo
caagcaauccuccuaccuu

SEQ ID NO: 57671 - RNA, 19 nt, Artificial Sequence
  Sense Oligo
agguaggaggauugcuuga

SEQ ID NO: 57672 - RNA, 19 nt, Artificial Sequence
  Antisense Oligo
ucaagcaauccuccuaccu

SEQ ID NO: 57673 - RNA, 19 nt, Artificial Sequence
  Sense Oligo
gguaggaggauugcuugag

SEQ ID NO: 57674 - RNA, 19 nt, Artificial Sequence
  Antisense Oligo
cucaagcaauccuccuacc

SEQ ID NO: 57675 - RNA, 19 nt, Artificial Sequence
  Sense Oligo
guaggaggauugcuugagc

SEQ ID NO: 57676 - RNA, 19 nt, Artificial Sequence
  Antisense Oligo
gcucaagcaauccuccuac

SEQ ID NO: 57677 - RNA, 19 nt, Artificial Sequence
  Sense Oligo
cgaggcucugucucauaaa

SEQ ID NO: 57678 - RNA, 19 nt, Artificial Sequence
  Antisense Oligo
uuuaugagacagagccucg

SEQ ID NO: 57679 - RNA, 19 nt, Artificial Sequence
  Sense Oligo
aguccaaaugaauauaagg

SEQ ID NO: 57680 - RNA, 19 nt, Artificial Sequence
  Antisense Oligo
ccuuauauucauuuggacu

SEQ ID NO: 57681 - RNA, 19 nt, Artificial Sequence
  Sense Oligo
guccaaaugaauauaagga

SEQ ID NO: 57682 - RNA, 19 nt, Artificial Sequence
  Antisense Oligo
uccuuauauucauuuggac

SEQ ID NO: 57683 - RNA, 19 nt, Artificial Sequence
  Sense Oligo
ccaaaugaauauaaggaag

SEQ ID NO: 57684 - RNA, 19 nt, Artificial Sequence
  Antisense Oligo
cuuccuuauauucauuugg

SEQ ID NO: 57685 - RNA, 19 nt, Artificial Sequence
  Sense Oligo
auauaaggaagucaguuug

SEQ ID NO: 57686 - RNA, 19 nt, Artificial Sequence
  Antisense Oligo
caaacugacuuccuuauau

SEQ ID NO: 57687 - RNA, 19 nt, Artificial Sequence
  Sense Oligo
uauaaggaagucaguuugg

SEQ ID NO: 57688 - RNA, 19 nt, Artificial Sequence
  Antisense Oligo
ccaaacugacuuccuuaua

SEQ ID NO: 57689 - RNA, 19 nt, Artificial Sequence
  Sense Oligo
auaaggaagucaguuugga

SEQ ID NO: 57690 - RNA, 19 nt, Artificial Sequence
  Antisense Oligo
uccaaacugacuuccuuau

SEQ ID NO: 57691 - RNA, 19 nt, Artificial Sequence
  Sense Oligo
uaaggaagucaguuuggaa

SEQ ID NO: 57692 - RNA, 19 nt, Artificial Sequence
  Antisense Oligo
uuccaaacugacuuccuua

SEQ ID NO: 57693 - RNA, 19 nt, Artificial Sequence
  Sense Oligo
aaggaagucaguuuggaag

SEQ ID NO: 57694 - RNA, 19 nt, Artificial Sequence
  Antisense Oligo
cuuccaaacugacuuccuu

SEQ ID NO: 57695 - RNA, 19 nt, Artificial Sequence
  Sense Oligo
ggaagucaguuuggaagcu

SEQ ID NO: 57696 - RNA, 19 nt, Artificial Sequence
  Antisense Oligo
agcuuccaaacugacuucc

SEQ ID NO: 57697 - RNA, 19 nt, Artificial Sequence
  Sense Oligo
ucaguuuggaagcucuucu

SEQ ID NO: 57698 - RNA, 19 nt, Artificial Sequence
  Antisense Oligo
agaagagcuuccaaacuga

SEQ ID NO: 57699 - RNA, 19 nt, Artificial Sequence
  Sense Oligo
caguuuggaagcucuucua

SEQ ID NO: 57700 - RNA, 19 nt, Artificial Sequence
  Antisense Oligo
uagaagagcuuccaaacug

SEQ ID NO: 57701 - RNA, 19 nt, Artificial Sequence
  Sense Oligo
aguuuggaagcucuucuag

SEQ ID NO: 57702 - RNA, 19 nt, Artificial Sequence
  Antisense Oligo
cuagaagagcuuccaaacu

SEQ ID NO: 57703 - RNA, 19 nt, Artificial Sequence
  Sense Oligo
aagcucuucuaguauucuu

SEQ ID NO: 57704 - RNA, 19 nt, Artificial Sequence
  Antisense Oligo
aagaauacuagaagagcuu

SEQ ID NO: 57705 - RNA, 19 nt, Artificial Sequence
  Sense Oligo
agcucuucuaguauucuug

SEQ ID NO: 57706 - RNA, 19 nt, Artificial Sequence
  Antisense Oligo
caagaauacuagaagagcu

SEQ ID NO: 57707 - RNA, 19 nt, Artificial Sequence
  Sense Oligo
gcucuucuaguauucuugg

SEQ ID NO: 57708 - RNA, 19 nt, Artificial Sequence
  Antisense Oligo
ccaagaauacuagaagagc

SEQ ID NO: 57709 - RNA, 19 nt, Artificial Sequence
  Sense Oligo
cucuucuaguauucuuggu

SEQ ID NO: 57710 - RNA, 19 nt, Artificial Sequence
  Antisense Oligo
accaagaauacuagaagag

SEQ ID NO: 57711 - RNA, 19 nt, Artificial Sequence
  Sense Oligo
ucuucuaguauucuuggua

SEQ ID NO: 57712 - RNA, 19 nt, Artificial Sequence
  Antisense Oligo
uaccaagaauacuagaaga

SEQ ID NO: 57713 - RNA, 19 nt, Artificial Sequence
  Sense Oligo
cuucuaguauucuugguau

SEQ ID NO: 57714 - RNA, 19 nt, Artificial Sequence
  Antisense Oligo
auaccaagaauacuagaag

SEQ ID NO: 57715 - RNA, 19 nt, Artificial Sequence
  Sense Oligo
cuaguauucuugguauuag

SEQ ID NO: 57716 - RNA, 19 nt, Artificial Sequence
  Antisense Oligo
cuaauaccaagaauacuag

SEQ ID NO: 57717 - RNA, 19 nt, Artificial Sequence
  Sense Oligo
guauucuugguauuagauc

SEQ ID NO: 57718 - RNA, 19 nt, Artificial Sequence
  Antisense Oligo
gaucuaauaccaagaauac

SEQ ID NO: 57719 - RNA, 19 nt, Artificial Sequence
  Sense Oligo
gguauuagaucaugaagug

SEQ ID NO: 57720 - RNA, 19 nt, Artificial Sequence
  Antisense Oligo
cacuucaugaucuaauacc

SEQ ID NO: 57721 - RNA, 19 nt, Artificial Sequence
  Sense Oligo
guauuagaucaugaagugc

SEQ ID NO: 57722 - RNA, 19 nt, Artificial Sequence
  Antisense Oligo
gcacuucaugaucuaauac

SEQ ID NO: 57723 - RNA, 19 nt, Artificial Sequence
  Sense Oligo
uauuagaucaugaagugcc

SEQ ID NO: 57724 - RNA, 19 nt, Artificial Sequence
  Antisense Oligo
ggcacuucaugaucuaaua

SEQ ID NO: 57725 - RNA, 19 nt, Artificial Sequence
  Sense Oligo
auuagaucaugaagugcca

SEQ ID NO: 57726 - RNA, 19 nt, Artificial Sequence
  Antisense Oligo
uggcacuucaugaucuaau

SEQ ID NO: 57727 - RNA, 19 nt, Artificial Sequence
  Sense Oligo
uuagaucaugaagugccac

SEQ ID NO: 57728 - RNA, 19 nt, Artificial Sequence
  Antisense Oligo
guggcacuucaugaucuaa

SEQ ID NO: 57729 - RNA, 19 nt, Artificial Sequence
  Sense Oligo
uagaucaugaagugccaca

SEQ ID NO: 57730 - RNA, 19 nt, Artificial Sequence
  Antisense Oligo
uguggcacuucaugaucua

SEQ ID NO: 57731 - RNA, 19 nt, Artificial Sequence
  Sense Oligo
ucaugaagugccacaggcu

SEQ ID NO: 57732 - RNA, 19 nt, Artificial Sequence
  Antisense Oligo
agccuguggcacuucauga

SEQ ID NO: 57733 - RNA, 19 nt, Artificial Sequence
  Sense Oligo
caugaagugccacaggcua

SEQ ID NO: 57734 - RNA, 19 nt, Artificial Sequence
  Antisense Oligo
uagccuguggcacuucaug

SEQ ID NO: 57735 - RNA, 19 nt, Artificial Sequence
  Sense Oligo
augaagugccacaggcuag

SEQ ID NO: 57736 - RNA, 19 nt, Artificial Sequence
  Antisense Oligo
cuagccuguggcacuucau

SEQ ID NO: 57737 - RNA, 19 nt, Artificial Sequence
  Sense Oligo
ugaagugccacaggcuagu

SEQ ID NO: 57738 - RNA, 19 nt, Artificial Sequence
  Antisense Oligo
acuagccuguggcacuuca

SEQ ID NO: 57739 - RNA, 19 nt, Artificial Sequence
  Sense Oligo
gaagugccacaggcuagug

SEQ ID NO: 57740 - RNA, 19 nt, Artificial Sequence
  Antisense Oligo
cacuagccuguggcacuuc

SEQ ID NO: 57741 - RNA, 19 nt, Artificial Sequence
  Sense Oligo
aagugccacaggcuagugu

SEQ ID NO: 57742 - RNA, 19 nt, Artificial Sequence
  Antisense Oligo
acacuagccuguggcacuu

SEQ ID NO: 57743 - RNA, 19 nt, Artificial Sequence
  Sense Oligo
acaggcuagugugauagau

SEQ ID NO: 57744 - RNA, 19 nt, Artificial Sequence
  Antisense Oligo
aucuaucacacuagccugu

SEQ ID NO: 57745 - RNA, 19 nt, Artificial Sequence
  Sense Oligo
caggcuagugugauagaug

SEQ ID NO: 57746 - RNA, 19 nt, Artificial Sequence
  Antisense Oligo
caucuaucacacuagccug

SEQ ID NO: 57747 - RNA, 19 nt, Artificial Sequence
  Sense Oligo
aggcuagugugauagaugg

SEQ ID NO: 57748 - RNA, 19 nt, Artificial Sequence
  Antisense Oligo
ccaucuaucacacuagccu

SEQ ID NO: 57749 - RNA, 19 nt, Artificial Sequence
  Sense Oligo
ggcuagugugauagaugga

SEQ ID NO: 57750 - RNA, 19 nt, Artificial Sequence
  Antisense Oligo
uccaucuaucacacuagcc

SEQ ID NO: 57751 - RNA, 19 nt, Artificial Sequence
  Sense Oligo
agugugauagauggaggga

SEQ ID NO: 57752 - RNA, 19 nt, Artificial Sequence
  Antisense Oligo
ucccuccaucuaucacacu

SEQ ID NO: 57753 - RNA, 19 nt, Artificial Sequence
  Sense Oligo
gucuauaaagugucacucu

SEQ ID NO: 57754 - RNA, 19 nt, Artificial Sequence
  Antisense Oligo
agagugacacuuuauagac

SEQ ID NO: 57755 - RNA, 19 nt, Artificial Sequence
  Sense Oligo
auaaagugucacucuggga

SEQ ID NO: 57756 - RNA, 19 nt, Artificial Sequence
  Antisense Oligo
ucccagagugacacuuuau

SEQ ID NO: 57757 - RNA, 19 nt, Artificial Sequence
  Sense Oligo
uaaagugucacucugggaa

SEQ ID NO: 57758 - RNA, 19 nt, Artificial Sequence
  Antisense Oligo
uucccagagugacacuuua

SEQ ID NO: 57759 - RNA, 19 nt, Artificial Sequence
  Sense Oligo
aaagugucacucugggaau

SEQ ID NO: 57760 - RNA, 19 nt, Artificial Sequence
  Antisense Oligo
auucccagagugacacuuu

SEQ ID NO: 57761 - RNA, 19 nt, Artificial Sequence
  Sense Oligo
aagugucacucugggaaua

SEQ ID NO: 57762 - RNA, 19 nt, Artificial Sequence
  Antisense Oligo
uauucccagagugacacuu

SEQ ID NO: 57763 - RNA, 19 nt, Artificial Sequence
  Sense Oligo
agugucacucugggaauaa

SEQ ID NO: 57764 - RNA, 19 nt, Artificial Sequence
  Antisense Oligo
uuauucccagagugacacu

SEQ ID NO: 57765 - RNA, 19 nt, Artificial Sequence
  Sense Oligo
gugucacucugggaauaaa

SEQ ID NO: 57766 - RNA, 19 nt, Artificial Sequence
  Antisense Oligo
uuuauucccagagugacac

SEQ ID NO: 57767 - RNA, 19 nt, Artificial Sequence
  Sense Oligo
gucacucugggaauaaagc

SEQ ID NO: 57768 - RNA, 19 nt, Artificial Sequence
  Antisense Oligo
gcuuuauucccagagugac

SEQ ID NO: 57769 - RNA, 19 nt, Artificial Sequence
  Sense Oligo
cucugggaauaaagcuuaa

SEQ ID NO: 57770 - RNA, 19 nt, Artificial Sequence
  Antisense Oligo
uuaagcuuuauucccagag

SEQ ID NO: 57771 - RNA, 19 nt, Artificial Sequence
  Sense Oligo
ucugggaauaaagcuuaaa

SEQ ID NO: 57772 - RNA, 19 nt, Artificial Sequence
  Antisense Oligo
uuuaagcuuuauucccaga

SEQ ID NO: 57773 - RNA, 19 nt, Artificial Sequence
  Sense Oligo
cugggaauaaagcuuaaau

SEQ ID NO: 57774 - RNA, 19 nt, Artificial Sequence
  Antisense Oligo
auuuaagcuuuauucccag

SEQ ID NO: 57775 - RNA, 19 nt, Artificial Sequence
  Sense Oligo
gggaauaaagcuuaaauug

SEQ ID NO: 57776 - RNA, 19 nt, Artificial Sequence
  Antisense Oligo
caauuuaagcuuuauuccc

SEQ ID NO: 57777 - RNA, 19 nt, Artificial Sequence
  Sense Oligo
aaagcuuaaauugucucac

SEQ ID NO: 57778 - RNA, 19 nt, Artificial Sequence
  Antisense Oligo
gugagacaauuuaagcuuu

SEQ ID NO: 57779 - RNA, 19 nt, Artificial Sequence
  Sense Oligo
aagcuuaaauugucucacu

SEQ ID NO: 57780 - RNA, 19 nt, Artificial Sequence
  Antisense Oligo
agugagacaauuuaagcuu

SEQ ID NO: 57781 - RNA, 19 nt, Artificial Sequence
  Sense Oligo
acaguuccaguuugcccac

SEQ ID NO: 57782 - RNA, 19 nt, Artificial Sequence
  Antisense Oligo
gugggcaaacuggaacugu

SEQ ID NO: 57783 - RNA, 19 nt, Artificial Sequence
  Sense Oligo
caguuccaguuugcccacg

SEQ ID NO: 57784 - RNA, 19 nt, Artificial Sequence
  Antisense Oligo
cgugggcaaacuggaacug

SEQ ID NO: 57785 - RNA, 19 nt, Artificial Sequence
  Sense Oligo
aguuccaguuugcccacgu

SEQ ID NO: 57786 - RNA, 19 nt, Artificial Sequence
  Antisense Oligo
acgugggcaaacuggaacu

SEQ ID NO: 57787 - RNA, 19 nt, Artificial Sequence
  Sense Oligo
guuccaguuugcccacgug

SEQ ID NO: 57788 - RNA, 19 nt, Artificial Sequence
  Antisense Oligo
cacgugggcaaacuggaac

SEQ ID NO: 57789 - RNA, 19 nt, Artificial Sequence
  Sense Oligo
uuccaguuugcccacgugc

SEQ ID NO: 57790 - RNA, 19 nt, Artificial Sequence
  Antisense Oligo
gcacgugggcaaacuggaa

SEQ ID NO: 57791 - RNA, 19 nt, Artificial Sequence
  Sense Oligo
uccaguuugcccacgugca

SEQ ID NO: 57792 - RNA, 19 nt, Artificial Sequence
  Antisense Oligo
ugcacgugggcaaacugga

SEQ ID NO: 57793 - RNA, 19 nt, Artificial Sequence
  Sense Oligo
acauuagugaguaccuacc

SEQ ID NO: 57794 - RNA, 19 nt, Artificial Sequence
  Antisense Oligo
gguagguacucacuaaugu

SEQ ID NO: 57795 - RNA, 19 nt, Artificial Sequence
  Sense Oligo
cauuagugaguaccuaccc

SEQ ID NO: 57796 - RNA, 19 nt, Artificial Sequence
  Antisense Oligo
ggguagguacucacuaaug

SEQ ID NO: 57797 - RNA, 19 nt, Artificial Sequence
  Sense Oligo
agugaguaccuacccuguu

SEQ ID NO: 57798 - RNA, 19 nt, Artificial Sequence
  Antisense Oligo
aacaggguagguacucacu

SEQ ID NO: 57799 - RNA, 19 nt, Artificial Sequence
  Sense Oligo
gugaguaccuacccuguuc

SEQ ID NO: 57800 - RNA, 19 nt, Artificial Sequence
  Antisense Oligo
gaacaggguagguacucac

SEQ ID NO: 57801 - RNA, 19 nt, Artificial Sequence
  Sense Oligo
ugaguaccuacccuguucc

SEQ ID NO: 57802 - RNA, 19 nt, Artificial Sequence
  Antisense Oligo
ggaacaggguagguacuca

SEQ ID NO: 57803 - RNA, 19 nt, Artificial Sequence
  Sense Oligo
accuacccuguucccaugg

SEQ ID NO: 57804 - RNA, 19 nt, Artificial Sequence
  Antisense Oligo
ccaugggaacaggguaggu

SEQ ID NO: 57805 - RNA, 19 nt, Artificial Sequence
  Sense Oligo
ccuacccuguucccauggg

SEQ ID NO: 57806 - RNA, 19 nt, Artificial Sequence
  Antisense Oligo
cccaugggaacaggguagg

SEQ ID NO: 57807 - RNA, 19 nt, Artificial Sequence
  Sense Oligo
guucccauggguucuccac

SEQ ID NO: 57808 - RNA, 19 nt, Artificial Sequence
  Antisense Oligo
guggagaacccaugggaac

SEQ ID NO: 57809 - RNA, 19 nt, Artificial Sequence
  Sense Oligo
uucccauggguucuccacc

SEQ ID NO: 57810 - RNA, 19 nt, Artificial Sequence
  Antisense Oligo
gguggagaacccaugggaa

SEQ ID NO: 57811 - RNA, 19 nt, Artificial Sequence
  Sense Oligo
gguucuccacccacccgaa

SEQ ID NO: 57812 - RNA, 19 nt, Artificial Sequence
  Antisense Oligo
uucggguggguggagaacc

SEQ ID NO: 57813 - RNA, 19 nt, Artificial Sequence
  Sense Oligo
cacgucugccggugauaag

SEQ ID NO: 57814 - RNA, 19 nt, Artificial Sequence
  Antisense Oligo
cuuaucaccggcagacgug

SEQ ID NO: 57815 - RNA, 19 nt, Artificial Sequence
  Sense Oligo
acgucugccggugauaagg

SEQ ID NO: 57816 - RNA, 19 nt, Artificial Sequence
  Antisense Oligo
ccuuaucaccggcagacgu

SEQ ID NO: 57817 - RNA, 19 nt, Artificial Sequence
  Sense Oligo
cgucugccggugauaagga

SEQ ID NO: 57818 - RNA, 19 nt, Artificial Sequence
  Antisense Oligo
uccuuaucaccggcagacg

SEQ ID NO: 57819 - RNA, 19 nt, Artificial Sequence
  Sense Oligo
gucugccggugauaaggag

SEQ ID NO: 57820 - RNA, 19 nt, Artificial Sequence
  Antisense Oligo
cuccuuaucaccggcagac

SEQ ID NO: 57821 - RNA, 19 nt, Artificial Sequence
  Sense Oligo
ucugccggugauaaggagg

SEQ ID NO: 57822 - RNA, 19 nt, Artificial Sequence
  Antisense Oligo
ccuccuuaucaccggcaga

SEQ ID NO: 57823 - RNA, 19 nt, Artificial Sequence
  Sense Oligo
cugccggugauaaggaggu

SEQ ID NO: 57824 - RNA, 19 nt, Artificial Sequence
  Antisense Oligo
accuccuuaucaccggcag

SEQ ID NO: 57825 - RNA, 19 nt, Artificial Sequence
  Sense Oligo
ugccggugauaaggaggug

SEQ ID NO: 57826 - RNA, 19 nt, Artificial Sequence
  Antisense Oligo
caccuccuuaucaccggca

SEQ ID NO: 57827 - RNA, 19 nt, Artificial Sequence
  Sense Oligo
gccggugauaaggaggugu

SEQ ID NO: 57828 - RNA, 19 nt, Artificial Sequence
  Antisense Oligo
acaccuccuuaucaccggc

SEQ ID NO: 57829 - RNA, 19 nt, Artificial Sequence
  Sense Oligo
ccggugauaaggagguguu

SEQ ID NO: 57830 - RNA, 19 nt, Artificial Sequence
  Antisense Oligo
aacaccuccuuaucaccgg

SEQ ID NO: 57831 - RNA, 19 nt, Artificial Sequence
  Sense Oligo
cggugauaaggagguguuc

SEQ ID NO: 57832 - RNA, 19 nt, Artificial Sequence
  Antisense Oligo
gaacaccuccuuaucaccg

SEQ ID NO: 57833 - RNA, 19 nt, Artificial Sequence
  Sense Oligo
ggugauaaggagguguuca

SEQ ID NO: 57834 - RNA, 19 nt, Artificial Sequence
  Antisense Oligo
ugaacaccuccuuaucacc

SEQ ID NO: 57835 - RNA, 19 nt, Artificial Sequence
  Sense Oligo
gugauaaggagguguucau

SEQ ID NO: 57836 - RNA, 19 nt, Artificial Sequence
  Antisense Oligo
augaacaccuccuuaucac

SEQ ID NO: 57837 - RNA, 19 nt, Artificial Sequence
  Sense Oligo
gauaaggagguguucauuu

SEQ ID NO: 57838 - RNA, 19 nt, Artificial Sequence
  Antisense Oligo
aaaugaacaccuccuuauc

SEQ ID NO: 57839 - RNA, 19 nt, Artificial Sequence
  Sense Oligo
auaaggagguguucauuug

SEQ ID NO: 57840 - RNA, 19 nt, Artificial Sequence
  Antisense Oligo
caaaugaacaccuccuuau

SEQ ID NO: 57841 - RNA, 19 nt, Artificial Sequence
  Sense Oligo
uaaggagguguucauuugc

SEQ ID NO: 57842 - RNA, 19 nt, Artificial Sequence
  Antisense Oligo
gcaaaugaacaccuccuua

SEQ ID NO: 57843 - RNA, 19 nt, Artificial Sequence
  Sense Oligo
aaggagguguucauuugca

SEQ ID NO: 57844 - RNA, 19 nt, Artificial Sequence
  Antisense Oligo
ugcaaaugaacaccuccuu

SEQ ID NO: 57845 - RNA, 19 nt, Artificial Sequence
  Sense Oligo
aggagguguucauuugcau

SEQ ID NO: 57846 - RNA, 19 nt, Artificial Sequence
  Antisense Oligo
augcaaaugaacaccuccu

SEQ ID NO: 57847 - RNA, 19 nt, Artificial Sequence
  Sense Oligo
ggagguguucauuugcaug

SEQ ID NO: 57848 - RNA, 19 nt, Artificial Sequence
  Antisense Oligo
caugcaaaugaacaccucc

SEQ ID NO: 57849 - RNA, 19 nt, Artificial Sequence
  Sense Oligo
uuugcaugauggcauuugu

SEQ ID NO: 57850 - RNA, 19 nt, Artificial Sequence
  Antisense Oligo
acaaaugccaucaugcaaa

SEQ ID NO: 57851 - RNA, 19 nt, Artificial Sequence
  Sense Oligo
uugcaugauggcauuugug

SEQ ID NO: 57852 - RNA, 19 nt, Artificial Sequence
  Antisense Oligo
cacaaaugccaucaugcaa

SEQ ID NO: 57853 - RNA, 19 nt, Artificial Sequence
  Sense Oligo
ugcaugauggcauuugugc

SEQ ID NO: 57854 - RNA, 19 nt, Artificial Sequence
  Antisense Oligo
gcacaaaugccaucaugca

SEQ ID NO: 57855 - RNA, 19 nt, Artificial Sequence
  Sense Oligo
gcaugauggcauuugugca

SEQ ID NO: 57856 - RNA, 19 nt, Artificial Sequence
  Antisense Oligo
ugcacaaaugccaucaugc

SEQ ID NO: 57857 - RNA, 19 nt, Artificial Sequence
  Sense Oligo
gauggcauuugugcauaaa

SEQ ID NO: 57858 - RNA, 19 nt, Artificial Sequence
  Antisense Oligo
uuuaugcacaaaugccauc

SEQ ID NO: 57859 - RNA, 19 nt, Artificial Sequence
  Sense Oligo
uuugugcauaaaaugguac

SEQ ID NO: 57860 - RNA, 19 nt, Artificial Sequence
  Antisense Oligo
guaccauuuuaugcacaaa

SEQ ID NO: 57861 - RNA, 19 nt, Artificial Sequence
  Sense Oligo
ugugcauaaaaugguacug

SEQ ID NO: 57862 - RNA, 19 nt, Artificial Sequence
  Antisense Oligo
caguaccauuuuaugcaca

SEQ ID NO: 57863 - RNA, 19 nt, Artificial Sequence
  Sense Oligo
gugcauaaaaugguacugc

SEQ ID NO: 57864 - RNA, 19 nt, Artificial Sequence
  Antisense Oligo
gcaguaccauuuuaugcac

SEQ ID NO: 57865 - RNA, 19 nt, Artificial Sequence
  Sense Oligo
ugcauaaaaugguacugcu

SEQ ID NO: 57866 - RNA, 19 nt, Artificial Sequence
  Antisense Oligo
agcaguaccauuuuaugca

SEQ ID NO: 57867 - RNA, 19 nt, Artificial Sequence
  Sense Oligo
gcauaaaaugguacugcuc

SEQ ID NO: 57868 - RNA, 19 nt, Artificial Sequence
  Antisense Oligo
gagcaguaccauuuuaugc

SEQ ID NO: 57869 - RNA, 19 nt, Artificial Sequence
  Sense Oligo
cauaaaaugguacugcucc

SEQ ID NO: 57870 - RNA, 19 nt, Artificial Sequence
  Antisense Oligo
ggagcaguaccauuuuaug

SEQ ID NO: 57871 - RNA, 19 nt, Artificial Sequence
  Sense Oligo
auaaaaugguacugcucca

SEQ ID NO: 57872 - RNA, 19 nt, Artificial Sequence
  Antisense Oligo
uggagcaguaccauuuuau

SEQ ID NO: 57873 - RNA, 19 nt, Artificial Sequence
  Sense Oligo
uaaaaugguacugcuccag

SEQ ID NO: 57874 - RNA, 19 nt, Artificial Sequence
  Antisense Oligo
cuggagcaguaccauuuua

SEQ ID NO: 57875 - RNA, 19 nt, Artificial Sequence
  Sense Oligo
aaaaugguacugcuccaga

SEQ ID NO: 57876 - RNA, 19 nt, Artificial Sequence
  Antisense Oligo
ucuggagcaguaccauuuu

SEQ ID NO: 57877 - RNA, 19 nt, Artificial Sequence
  Sense Oligo
aaaugguacugcuccagaa

SEQ ID NO: 57878 - RNA, 19 nt, Artificial Sequence
  Antisense Oligo
uucuggagcaguaccauuu

SEQ ID NO: 57879 - RNA, 19 nt, Artificial Sequence
  Sense Oligo
aaugguacugcuccagaag

SEQ ID NO: 57880 - RNA, 19 nt, Artificial Sequence
  Antisense Oligo
cuucuggagcaguaccauu

SEQ ID NO: 57881 - RNA, 19 nt, Artificial Sequence
  Sense Oligo
augguacugcuccagaagu

SEQ ID NO: 57882 - RNA, 19 nt, Artificial Sequence
  Antisense Oligo
acuucuggagcaguaccau

SEQ ID NO: 57883 - RNA, 19 nt, Artificial Sequence
  Sense Oligo
ugguacugcuccagaagug

SEQ ID NO: 57884 - RNA, 19 nt, Artificial Sequence
  Antisense Oligo
cacuucuggagcaguacca

SEQ ID NO: 57885 - RNA, 19 nt, Artificial Sequence
  Sense Oligo
gguacugcuccagaagugg

SEQ ID NO: 57886 - RNA, 19 nt, Artificial Sequence
  Antisense Oligo
ccacuucuggagcaguacc

SEQ ID NO: 57887 - RNA, 19 nt, Artificial Sequence
  Sense Oligo
guacugcuccagaaguggu

SEQ ID NO: 57888 - RNA, 19 nt, Artificial Sequence
  Antisense Oligo
accacuucuggagcaguac

SEQ ID NO: 57889 - RNA, 19 nt, Artificial Sequence
  Sense Oligo
uacugcuccagaagugguu

SEQ ID NO: 57890 - RNA, 19 nt, Artificial Sequence
  Antisense Oligo
aaccacuucuggagcagua

SEQ ID NO: 57891 - RNA, 19 nt, Artificial Sequence
  Sense Oligo
acugcuccagaagugguuc

SEQ ID NO: 57892 - RNA, 19 nt, Artificial Sequence
  Antisense Oligo
gaaccacuucuggagcagu

SEQ ID NO: 57893 - RNA, 19 nt, Artificial Sequence
  Sense Oligo
gaagugguucuagugcccu

SEQ ID NO: 57894 - RNA, 19 nt, Artificial Sequence
  Antisense Oligo
agggcacuagaaccacuuc

SEQ ID NO: 57895 - RNA, 19 nt, Artificial Sequence
  Sense Oligo
aagugguucuagugcccug

SEQ ID NO: 57896 - RNA, 19 nt, Artificial Sequence
  Antisense Oligo
cagggcacuagaaccacuu

SEQ ID NO: 57897 - RNA, 19 nt, Artificial Sequence
  Sense Oligo
agugguucuagugcccugu

SEQ ID NO: 57898 - RNA, 19 nt, Artificial Sequence
  Antisense Oligo
acagggcacuagaaccacu

SEQ ID NO: 57899 - RNA, 19 nt, Artificial Sequence
  Sense Oligo
gugguucuagugcccuguc

SEQ ID NO: 57900 - RNA, 19 nt, Artificial Sequence
  Antisense Oligo
gacagggcacuagaaccac

SEQ ID NO: 57901 - RNA, 19 nt, Artificial Sequence
  Sense Oligo
ugguucuagugcccugucu

SEQ ID NO: 57902 - RNA, 19 nt, Artificial Sequence
  Antisense Oligo
agacagggcacuagaacca

SEQ ID NO: 57903 - RNA, 19 nt, Artificial Sequence
  Sense Oligo
gguucuagugcccugucuu

SEQ ID NO: 57904 - RNA, 19 nt, Artificial Sequence
  Antisense Oligo
aagacagggcacuagaacc

SEQ ID NO: 57905 - RNA, 19 nt, Artificial Sequence
  Sense Oligo
guucuagugcccugucuuc

SEQ ID NO: 57906 - RNA, 19 nt, Artificial Sequence
  Antisense Oligo
gaagacagggcacuagaac

SEQ ID NO: 57907 - RNA, 19 nt, Artificial Sequence
  Sense Oligo
uagugcccugucuucaccc

SEQ ID NO: 57908 - RNA, 19 nt, Artificial Sequence
  Antisense Oligo
gggugaagacagggcacua

SEQ ID NO: 57909 - RNA, 19 nt, Artificial Sequence
  Sense Oligo
agugcccugucuucacccu

SEQ ID NO: 57910 - RNA, 19 nt, Artificial Sequence
  Antisense Oligo
agggugaagacagggcacu

SEQ ID NO: 57911 - RNA, 19 nt, Artificial Sequence
  Sense Oligo
gugcccugucuucacccua

SEQ ID NO: 57912 - RNA, 19 nt, Artificial Sequence
  Antisense Oligo
uagggugaagacagggcac

SEQ ID NO: 57913 - RNA, 19 nt, Artificial Sequence
  Sense Oligo
gcccugucuucacccuagu

SEQ ID NO: 57914 - RNA, 19 nt, Artificial Sequence
  Antisense Oligo
acuagggugaagacagggc

SEQ ID NO: 57915 - RNA, 19 nt, Artificial Sequence
  Sense Oligo
cccugucuucacccuagug

SEQ ID NO: 57916 - RNA, 19 nt, Artificial Sequence
  Antisense Oligo
cacuagggugaagacaggg

SEQ ID NO: 57917 - RNA, 19 nt, Artificial Sequence
  Sense Oligo
ccugucuucacccuagugu

SEQ ID NO: 57918 - RNA, 19 nt, Artificial Sequence
  Antisense Oligo
acacuagggugaagacagg

SEQ ID NO: 57919 - RNA, 19 nt, Artificial Sequence
  Sense Oligo
cugucuucacccuagugug

SEQ ID NO: 57920 - RNA, 19 nt, Artificial Sequence
  Antisense Oligo
cacacuagggugaagacag

SEQ ID NO: 57921 - RNA, 19 nt, Artificial Sequence
  Sense Oligo
ugucuucacccuagugugg

SEQ ID NO: 57922 - RNA, 19 nt, Artificial Sequence
  Antisense Oligo
ccacacuagggugaagaca

SEQ ID NO: 57923 - RNA, 19 nt, Artificial Sequence
  Sense Oligo
gucuucacccuaguguggc

SEQ ID NO: 57924 - RNA, 19 nt, Artificial Sequence
  Antisense Oligo
gccacacuagggugaagac

SEQ ID NO: 57925 - RNA, 19 nt, Artificial Sequence
  Sense Oligo
ucuucacccuaguguggca

SEQ ID NO: 57926 - RNA, 19 nt, Artificial Sequence
  Antisense Oligo
ugccacacuagggugaaga

SEQ ID NO: 57927 - RNA, 19 nt, Artificial Sequence
  Sense Oligo
cuucacccuaguguggcag

SEQ ID NO: 57928 - RNA, 19 nt, Artificial Sequence
  Antisense Oligo
cugccacacuagggugaag

SEQ ID NO: 57929 - RNA, 19 nt, Artificial Sequence
  Sense Oligo
uucacccuaguguggcagg

SEQ ID NO: 57930 - RNA, 19 nt, Artificial Sequence
  Antisense Oligo
ccugccacacuagggugaa

SEQ ID NO: 57931 - RNA, 19 nt, Artificial Sequence
  Sense Oligo
ucacccuaguguggcaggc

SEQ ID NO: 57932 - RNA, 19 nt, Artificial Sequence
  Antisense Oligo
gccugccacacuaggguga

SEQ ID NO: 57933 - RNA, 19 nt, Artificial Sequence
  Sense Oligo
ccuaguguggcaggccgau

SEQ ID NO: 57934 - RNA, 19 nt, Artificial Sequence
  Antisense Oligo
aucggccugccacacuagg

SEQ ID NO: 57935 - RNA, 19 nt, Artificial Sequence
  Sense Oligo
cuaguguggcaggccgaug

SEQ ID NO: 57936 - RNA, 19 nt, Artificial Sequence
  Antisense Oligo
caucggccugccacacuag

SEQ ID NO: 57937 - RNA, 19 nt, Artificial Sequence
  Sense Oligo
agagcaucugcauugacug

SEQ ID NO: 57938 - RNA, 19 nt, Artificial Sequence
  Antisense Oligo
cagucaaugcagaugcucu

SEQ ID NO: 57939 - RNA, 19 nt, Artificial Sequence
  Sense Oligo
gagcaucugcauugacugc

SEQ ID NO: 57940 - RNA, 19 nt, Artificial Sequence
  Antisense Oligo
gcagucaaugcagaugcuc

SEQ ID NO: 57941 - RNA, 19 nt, Artificial Sequence
  Sense Oligo
ccgauuggaggcauugacc

SEQ ID NO: 57942 - RNA, 19 nt, Artificial Sequence
  Antisense Oligo
ggucaaugccuccaaucgg

SEQ ID NO: 57943 - RNA, 19 nt, Artificial Sequence
  Sense Oligo
cgauuggaggcauugacca

SEQ ID NO: 57944 - RNA, 19 nt, Artificial Sequence
  Antisense Oligo
uggucaaugccuccaaucg

SEQ ID NO: 57945 - RNA, 19 nt, Artificial Sequence
  Sense Oligo
gauuggaggcauugaccac

SEQ ID NO: 57946 - RNA, 19 nt, Artificial Sequence
  Antisense Oligo
guggucaaugccuccaauc

SEQ ID NO: 57947 - RNA, 19 nt, Artificial Sequence
  Sense Oligo
auuggaggcauugaccaca

SEQ ID NO: 57948 - RNA, 19 nt, Artificial Sequence
  Antisense Oligo
uguggucaaugccuccaau

SEQ ID NO: 57949 - RNA, 19 nt, Artificial Sequence
  Sense Oligo
cucgggacggcuuucaucu

SEQ ID NO: 57950 - RNA, 19 nt, Artificial Sequence
  Antisense Oligo
agaugaaagccgucccgag

SEQ ID NO: 57951 - RNA, 19 nt, Artificial Sequence
  Sense Oligo
ucgggacggcuuucaucug

SEQ ID NO: 57952 - RNA, 19 nt, Artificial Sequence
  Antisense Oligo
cagaugaaagccgucccga

SEQ ID NO: 57953 - RNA, 19 nt, Artificial Sequence
  Sense Oligo
gacggcuuucaucugguca

SEQ ID NO: 57954 - RNA, 19 nt, Artificial Sequence
  Antisense Oligo
ugaccagaugaaagccguc

SEQ ID NO: 57955 - RNA, 19 nt, Artificial Sequence
  Sense Oligo
acggcuuucaucuggucaa

SEQ ID NO: 57956 - RNA, 19 nt, Artificial Sequence
  Antisense Oligo
uugaccagaugaaagccgu

SEQ ID NO: 57957 - RNA, 19 nt, Artificial Sequence
  Sense Oligo
cggcuuucaucuggucaag

SEQ ID NO: 57958 - RNA, 19 nt, Artificial Sequence
  Antisense Oligo
cuugaccagaugaaagccg

SEQ ID NO: 57959 - RNA, 19 nt, Artificial Sequence
  Sense Oligo
ggcuuucaucuggucaagu

SEQ ID NO: 57960 - RNA, 19 nt, Artificial Sequence
  Antisense Oligo
acuugaccagaugaaagcc

SEQ ID NO: 57961 - RNA, 19 nt, Artificial Sequence
  Sense Oligo
gcuuucaucuggucaagua

SEQ ID NO: 57962 - RNA, 19 nt, Artificial Sequence
  Antisense Oligo
uacuugaccagaugaaagc

SEQ ID NO: 57963 - RNA, 19 nt, Artificial Sequence
  Sense Oligo
cuuucaucuggucaaguau

SEQ ID NO: 57964 - RNA, 19 nt, Artificial Sequence
  Antisense Oligo
auacuugaccagaugaaag

SEQ ID NO: 57965 - RNA, 19 nt, Artificial Sequence
  Sense Oligo
uuucaucuggucaaguaug

SEQ ID NO: 57966 - RNA, 19 nt, Artificial Sequence
  Antisense Oligo
cauacuugaccagaugaaa

SEQ ID NO: 57967 - RNA, 19 nt, Artificial Sequence
  Sense Oligo
uucaucuggucaaguaugu

SEQ ID NO: 57968 - RNA, 19 nt, Artificial Sequence
  Antisense Oligo
acauacuugaccagaugaa

SEQ ID NO: 57969 - RNA, 19 nt, Artificial Sequence
  Sense Oligo
ucaucuggucaaguaugug

SEQ ID NO: 57970 - RNA, 19 nt, Artificial Sequence
  Antisense Oligo
cacauacuugaccagauga

SEQ ID NO: 57971 - RNA, 19 nt, Artificial Sequence
  Sense Oligo
caucuggucaaguaugugg

SEQ ID NO: 57972 - RNA, 19 nt, Artificial Sequence
  Antisense Oligo
ccacauacuugaccagaug

SEQ ID NO: 57973 - RNA, 19 nt, Artificial Sequence
  Sense Oligo
aucuggucaaguauguggg

SEQ ID NO: 57974 - RNA, 19 nt, Artificial Sequence
  Antisense Oligo
cccacauacuugaccagau

SEQ ID NO: 57975 - RNA, 19 nt, Artificial Sequence
  Sense Oligo
ucuggucaaguaugugggu

SEQ ID NO: 57976 - RNA, 19 nt, Artificial Sequence
  Antisense Oligo
acccacauacuugaccaga

SEQ ID NO: 57977 - RNA, 19 nt, Artificial Sequence
  Sense Oligo
cuggucaaguauguggguc

SEQ ID NO: 57978 - RNA, 19 nt, Artificial Sequence
  Antisense Oligo
gacccacauacuugaccag

SEQ ID NO: 57979 - RNA, 19 nt, Artificial Sequence
  Sense Oligo
uggucaaguauguggguca

SEQ ID NO: 57980 - RNA, 19 nt, Artificial Sequence
  Antisense Oligo
ugacccacauacuugacca

SEQ ID NO: 57981 - RNA, 19 nt, Artificial Sequence
  Sense Oligo
ggucaaguaugugggucag

SEQ ID NO: 57982 - RNA, 19 nt, Artificial Sequence
  Antisense Oligo
cugacccacauacuugacc

SEQ ID NO: 57983 - RNA, 19 nt, Artificial Sequence
  Sense Oligo
gucaaguaugugggucagg

SEQ ID NO: 57984 - RNA, 19 nt, Artificial Sequence
  Antisense Oligo
ccugacccacauacuugac

SEQ ID NO: 57985 - RNA, 19 nt, Artificial Sequence
  Sense Oligo
aguaugugggucaggauuc

SEQ ID NO: 57986 - RNA, 19 nt, Artificial Sequence
  Antisense Oligo
gaauccugacccacauacu

SEQ ID NO: 57987 - RNA, 19 nt, Artificial Sequence
  Sense Oligo
guaugugggucaggauucu

SEQ ID NO: 57988 - RNA, 19 nt, Artificial Sequence
  Antisense Oligo
agaauccugacccacauac

SEQ ID NO: 57989 - RNA, 19 nt, Artificial Sequence
  Sense Oligo
augugggucaggauucuau

SEQ ID NO: 57990 - RNA, 19 nt, Artificial Sequence
  Antisense Oligo
auagaauccugacccacau

SEQ ID NO: 57991 - RNA, 19 nt, Artificial Sequence
  Sense Oligo
ugugggucaggauucuauu

SEQ ID NO: 57992 - RNA, 19 nt, Artificial Sequence
  Antisense Oligo
aauagaauccugacccaca

SEQ ID NO: 57993 - RNA, 19 nt, Artificial Sequence
  Sense Oligo
gugggucaggauucuauuu

SEQ ID NO: 57994 - RNA, 19 nt, Artificial Sequence
  Antisense Oligo
aaauagaauccugacccac

SEQ ID NO: 57995 - RNA, 19 nt, Artificial Sequence
  Sense Oligo
ugggucaggauucuauuuc

SEQ ID NO: 57996 - RNA, 19 nt, Artificial Sequence
  Antisense Oligo
gaaauagaauccugaccca

SEQ ID NO: 57997 - RNA, 19 nt, Artificial Sequence
  Sense Oligo
gggucaggauucuauuucc

SEQ ID NO: 57998 - RNA, 19 nt, Artificial Sequence
  Antisense Oligo
ggaaauagaauccugaccc

SEQ ID NO: 57999 - RNA, 19 nt, Artificial Sequence
  Sense Oligo
ggauucuauuuccuaagua

SEQ ID NO: 58000 - RNA, 19 nt, Artificial Sequence
  Antisense Oligo
uacuuaggaaauagaaucc

SEQ ID NO: 58001 - RNA, 19 nt, Artificial Sequence
  Sense Oligo
gauucuauuuccuaaguac

SEQ ID NO: 58002 - RNA, 19 nt, Artificial Sequence
  Antisense Oligo
guacuuaggaaauagaauc

SEQ ID NO: 58003 - RNA, 19 nt, Artificial Sequence
  Sense Oligo
uucuauuuccuaaguacuc

SEQ ID NO: 58004 - RNA, 19 nt, Artificial Sequence
  Antisense Oligo
gaguacuuaggaaauagaa

SEQ ID NO: 58005 - RNA, 19 nt, Artificial Sequence
  Sense Oligo
cuauuuccuaaguacucaa

SEQ ID NO: 58006 - RNA, 19 nt, Artificial Sequence
  Antisense Oligo
uugaguacuuaggaaauag

SEQ ID NO: 58007 - RNA, 19 nt, Artificial Sequence
  Sense Oligo
uauuccagcugauaaagug

SEQ ID NO: 58008 - RNA, 19 nt, Artificial Sequence
  Antisense Oligo
cacuuuaucagcuggaaua

SEQ ID NO: 58009 - RNA, 19 nt, Artificial Sequence
  Sense Oligo
auuccagcugauaaaguga

SEQ ID NO: 58010 - RNA, 19 nt, Artificial Sequence
  Antisense Oligo
ucacuuuaucagcuggaau

SEQ ID NO: 58011 - RNA, 19 nt, Artificial Sequence
  Sense Oligo
cagcugauaaagugauacu

SEQ ID NO: 58012 - RNA, 19 nt, Artificial Sequence
  Antisense Oligo
aguaucacuuuaucagcug

SEQ ID NO: 58013 - RNA, 19 nt, Artificial Sequence
  Sense Oligo
ugauaaagugauacucaag

SEQ ID NO: 58014 - RNA, 19 nt, Artificial Sequence
  Antisense Oligo
cuugaguaucacuuuauca

SEQ ID NO: 58015 - RNA, 19 nt, Artificial Sequence
  Sense Oligo
gauaaagugauacucaaga

SEQ ID NO: 58016 - RNA, 19 nt, Artificial Sequence
  Antisense Oligo
ucuugaguaucacuuuauc

SEQ ID NO: 58017 - RNA, 19 nt, Artificial Sequence
  Sense Oligo
aaagugauacucaagauag

SEQ ID NO: 58018 - RNA, 19 nt, Artificial Sequence
  Antisense Oligo
cuaucuugaguaucacuuu

SEQ ID NO: 58019 - RNA, 19 nt, Artificial Sequence
  Sense Oligo
aagugauacucaagauagu

SEQ ID NO: 58020 - RNA, 19 nt, Artificial Sequence
  Antisense Oligo
acuaucuugaguaucacuu

SEQ ID NO: 58021 - RNA, 19 nt, Artificial Sequence
  Sense Oligo
acuaauuacuccaguacau

SEQ ID NO: 58022 - RNA, 19 nt, Artificial Sequence
  Antisense Oligo
auguacuggaguaauuagu

SEQ ID NO: 58023 - RNA, 19 nt, Artificial Sequence
  Sense Oligo
cuaauuacuccaguacaug

SEQ ID NO: 58024 - RNA, 19 nt, Artificial Sequence
  Antisense Oligo
cauguacuggaguaauuag

SEQ ID NO: 58025 - RNA, 19 nt, Artificial Sequence
  Sense Oligo
uaauuacuccaguacaugu

SEQ ID NO: 58026 - RNA, 19 nt, Artificial Sequence
  Antisense Oligo
acauguacuggaguaauua

SEQ ID NO: 58027 - RNA, 19 nt, Artificial Sequence
  Sense Oligo
aauuacuccaguacaugug

SEQ ID NO: 58028 - RNA, 19 nt, Artificial Sequence
  Antisense Oligo
cacauguacuggaguaauu

SEQ ID NO: 58029 - RNA, 19 nt, Artificial Sequence
  Sense Oligo
auuacuccaguacaugugg

SEQ ID NO: 58030 - RNA, 19 nt, Artificial Sequence
  Antisense Oligo
ccacauguacuggaguaau

SEQ ID NO: 58031 - RNA, 19 nt, Artificial Sequence
  Sense Oligo
uuacuccaguacauguggg

SEQ ID NO: 58032 - RNA, 19 nt, Artificial Sequence
  Antisense Oligo
cccacauguacuggaguaa

SEQ ID NO: 58033 - RNA, 19 nt, Artificial Sequence
  Sense Oligo
uacuccaguacaugugggc

SEQ ID NO: 58034 - RNA, 19 nt, Artificial Sequence
  Antisense Oligo
gcccacauguacuggagua

SEQ ID NO: 58035 - RNA, 19 nt, Artificial Sequence
  Sense Oligo
acuccaguacaugugggcc

SEQ ID NO: 58036 - RNA, 19 nt, Artificial Sequence
  Antisense Oligo
ggcccacauguacuggagu

SEQ ID NO: 58037 - RNA, 19 nt, Artificial Sequence
  Sense Oligo
uccaguacaugugggccug

SEQ ID NO: 58038 - RNA, 19 nt, Artificial Sequence
  Antisense Oligo
caggcccacauguacugga

SEQ ID NO: 58039 - RNA, 19 nt, Artificial Sequence
  Sense Oligo
ccaguacaugugggccugu

SEQ ID NO: 58040 - RNA, 19 nt, Artificial Sequence
  Antisense Oligo
acaggcccacauguacugg

SEQ ID NO: 58041 - RNA, 19 nt, Artificial Sequence
  Sense Oligo
caguacaugugggccugug

SEQ ID NO: 58042 - RNA, 19 nt, Artificial Sequence
  Antisense Oligo
cacaggcccacauguacug

SEQ ID NO: 58043 - RNA, 19 nt, Artificial Sequence
  Sense Oligo
aguacaugugggccugugu

SEQ ID NO: 58044 - RNA, 19 nt, Artificial Sequence
  Antisense Oligo
acacaggcccacauguacu

SEQ ID NO: 58045 - RNA, 19 nt, Artificial Sequence
  Sense Oligo
guacaugugggccuguguc

SEQ ID NO: 58046 - RNA, 19 nt, Artificial Sequence
  Antisense Oligo
gacacaggcccacauguac

SEQ ID NO: 58047 - RNA, 19 nt, Artificial Sequence
  Sense Oligo
uacaugugggccuguguca

SEQ ID NO: 58048 - RNA, 19 nt, Artificial Sequence
  Antisense Oligo
ugacacaggcccacaugua

SEQ ID NO: 58049 - RNA, 19 nt, Artificial Sequence
  Sense Oligo
aauagcaaugccaaagucc

SEQ ID NO: 58050 - RNA, 19 nt, Artificial Sequence
  Antisense Oligo
ggacuuuggcauugcuauu

SEQ ID NO: 58051 - RNA, 19 nt, Artificial Sequence
  Sense Oligo
auagcaaugccaaaguccc

SEQ ID NO: 58052 - RNA, 19 nt, Artificial Sequence
  Antisense Oligo
gggacuuuggcauugcuau

SEQ ID NO: 58053 - RNA, 19 nt, Artificial Sequence
  Sense Oligo
uagcaaugccaaaguccca

SEQ ID NO: 58054 - RNA, 19 nt, Artificial Sequence
  Antisense Oligo
ugggacuuuggcauugcua

SEQ ID NO: 58055 - RNA, 19 nt, Artificial Sequence
  Sense Oligo
gccaaagucccagcaguca

SEQ ID NO: 58056 - RNA, 19 nt, Artificial Sequence
  Antisense Oligo
ugacugcugggacuuuggc

SEQ ID NO: 58057 - RNA, 19 nt, Artificial Sequence
  Sense Oligo
cagcagggaggcaucugau

SEQ ID NO: 58058 - RNA, 19 nt, Artificial Sequence
  Antisense Oligo
aucagaugccucccugcug

SEQ ID NO: 58059 - RNA, 19 nt, Artificial Sequence
  Sense Oligo
agggaggcaucugaucugu

SEQ ID NO: 58060 - RNA, 19 nt, Artificial Sequence
  Antisense Oligo
acagaucagaugccucccu

SEQ ID NO: 58061 - RNA, 19 nt, Artificial Sequence
  Sense Oligo
gggaggcaucugaucuguu

SEQ ID NO: 58062 - RNA, 19 nt, Artificial Sequence
  Antisense Oligo
aacagaucagaugccuccc

SEQ ID NO: 58063 - RNA, 19 nt, Artificial Sequence
  Sense Oligo
ggaggcaucugaucuguug

SEQ ID NO: 58064 - RNA, 19 nt, Artificial Sequence
  Antisense Oligo
caacagaucagaugccucc

SEQ ID NO: 58065 - RNA, 19 nt, Artificial Sequence
  Sense Oligo
gaggcaucugaucuguugu

SEQ ID NO: 58066 - RNA, 19 nt, Artificial Sequence
  Antisense Oligo
acaacagaucagaugccuc

SEQ ID NO: 58067 - RNA, 19 nt, Artificial Sequence
  Sense Oligo
aggcaucugaucuguuguu

SEQ ID NO: 58068 - RNA, 19 nt, Artificial Sequence
  Antisense Oligo
aacaacagaucagaugccu

SEQ ID NO: 58069 - RNA, 19 nt, Artificial Sequence
  Sense Oligo
aucugaucuguuguuggau

SEQ ID NO: 58070 - RNA, 19 nt, Artificial Sequence
  Antisense Oligo
auccaacaacagaucagau

SEQ ID NO: 58071 - RNA, 19 nt, Artificial Sequence
  Sense Oligo
guuguuggaucccugggcc

SEQ ID NO: 58072 - RNA, 19 nt, Artificial Sequence
  Antisense Oligo
ggcccagggauccaacaac

SEQ ID NO: 58073 - RNA, 19 nt, Artificial Sequence
  Sense Oligo
aaaugcaaagcaggcuacc

SEQ ID NO: 58074 - RNA, 19 nt, Artificial Sequence
  Antisense Oligo
gguagccugcuuugcauuu

SEQ ID NO: 58075 - RNA, 19 nt, Artificial Sequence
  Sense Oligo
aaugcaaagcaggcuaccc

SEQ ID NO: 58076 - RNA, 19 nt, Artificial Sequence
  Antisense Oligo
ggguagccugcuuugcauu

SEQ ID NO: 58077 - RNA, 19 nt, Artificial Sequence
  Sense Oligo
augcaaagcaggcuacccu

SEQ ID NO: 58078 - RNA, 19 nt, Artificial Sequence
  Antisense Oligo
aggguagccugcuuugcau

SEQ ID NO: 58079 - RNA, 19 nt, Artificial Sequence
  Sense Oligo
ugcaaagcaggcuacccuu

SEQ ID NO: 58080 - RNA, 19 nt, Artificial Sequence
  Antisense Oligo
aaggguagccugcuuugca

SEQ ID NO: 58081 - RNA, 19 nt, Artificial Sequence
  Sense Oligo
aagcaggcuacccuuuaac

SEQ ID NO: 58082 - RNA, 19 nt, Artificial Sequence
  Antisense Oligo
guuaaaggguagccugcuu

SEQ ID NO: 58083 - RNA, 19 nt, Artificial Sequence
  Sense Oligo
uaauaugaauacagguguc

SEQ ID NO: 58084 - RNA, 19 nt, Artificial Sequence
  Antisense Oligo
gacaccuguauucauauua

SEQ ID NO: 58085 - RNA, 19 nt, Artificial Sequence
  Sense Oligo
aauaugaauacaggugucu

SEQ ID NO: 58086 - RNA, 19 nt, Artificial Sequence
  Antisense Oligo
agacaccuguauucauauu

SEQ ID NO: 58087 - RNA, 19 nt, Artificial Sequence
  Sense Oligo
uaugaauacaggugucuuc

SEQ ID NO: 58088 - RNA, 19 nt, Artificial Sequence
  Antisense Oligo
gaagacaccuguauucaua

SEQ ID NO: 58089 - RNA, 19 nt, Artificial Sequence
  Sense Oligo
aauacaggugucuuccuuu

SEQ ID NO: 58090 - RNA, 19 nt, Artificial Sequence
  Antisense Oligo
aaaggaagacaccuguauu

SEQ ID NO: 58091 - RNA, 19 nt, Artificial Sequence
  Sense Oligo
acaggugucuuccuuuugg

SEQ ID NO: 58092 - RNA, 19 nt, Artificial Sequence
  Antisense Oligo
ccaaaaggaagacaccugu

SEQ ID NO: 58093 - RNA, 19 nt, Artificial Sequence
  Sense Oligo
caggugucuuccuuuuggg

SEQ ID NO: 58094 - RNA, 19 nt, Artificial Sequence
  Antisense Oligo
cccaaaaggaagacaccug

SEQ ID NO: 58095 - RNA, 19 nt, Artificial Sequence
  Sense Oligo
aggugucuuccuuuugggc

SEQ ID NO: 58096 - RNA, 19 nt, Artificial Sequence
  Antisense Oligo
gcccaaaaggaagacaccu

SEQ ID NO: 58097 - RNA, 19 nt, Artificial Sequence
  Sense Oligo
ucuuccuuuugggccuugg

SEQ ID NO: 58098 - RNA, 19 nt, Artificial Sequence
  Antisense Oligo
ccaaggcccaaaaggaaga

SEQ ID NO: 58099 - RNA, 19 nt, Artificial Sequence
  Sense Oligo
cuuccuuuugggccuuggg

SEQ ID NO: 58100 - RNA, 19 nt, Artificial Sequence
  Antisense Oligo
cccaaggcccaaaaggaag

SEQ ID NO: 58101 - RNA, 19 nt, Artificial Sequence
  Sense Oligo
uuccuuuugggccuugggu

SEQ ID NO: 58102 - RNA, 19 nt, Artificial Sequence
  Antisense Oligo
acccaaggcccaaaaggaa

SEQ ID NO: 58103 - RNA, 19 nt, Artificial Sequence
  Sense Oligo
uccuuuugggccuugggug

SEQ ID NO: 58104 - RNA, 19 nt, Artificial Sequence
  Antisense Oligo
cacccaaggcccaaaagga

SEQ ID NO: 58105 - RNA, 19 nt, Artificial Sequence
  Sense Oligo
ccuuuugggccuugggugc

SEQ ID NO: 58106 - RNA, 19 nt, Artificial Sequence
  Antisense Oligo
gcacccaaggcccaaaagg

SEQ ID NO: 58107 - RNA, 19 nt, Artificial Sequence
  Sense Oligo
cuuuugggccuugggugca

SEQ ID NO: 58108 - RNA, 19 nt, Artificial Sequence
  Antisense Oligo
ugcacccaaggcccaaaag

SEQ ID NO: 58109 - RNA, 19 nt, Artificial Sequence
  Sense Oligo
uuuugggccuugggugcac

SEQ ID NO: 58110 - RNA, 19 nt, Artificial Sequence
  Antisense Oligo
gugcacccaaggcccaaaa

SEQ ID NO: 58111 - RNA, 19 nt, Artificial Sequence
  Sense Oligo
uuugggccuugggugcacc

SEQ ID NO: 58112 - RNA, 19 nt, Artificial Sequence
  Antisense Oligo
ggugcacccaaggcccaaa

SEQ ID NO: 58113 - RNA, 19 nt, Artificial Sequence
  Sense Oligo
uugggccuugggugcaccu

SEQ ID NO: 58114 - RNA, 19 nt, Artificial Sequence
  Antisense Oligo
aggugcacccaaggcccaa

SEQ ID NO: 58115 - RNA, 19 nt, Artificial Sequence
  Sense Oligo
cuugggugcaccuucugua

SEQ ID NO: 58116 - RNA, 19 nt, Artificial Sequence
  Antisense Oligo
uacagaaggugcacccaag

SEQ ID NO: 58117 - RNA, 19 nt, Artificial Sequence
  Sense Oligo
agaugaucuaauucacgag

SEQ ID NO: 58118 - RNA, 19 nt, Artificial Sequence
  Antisense Oligo
cucgugaauuagaucaucu

SEQ ID NO: 58119 - RNA, 19 nt, Artificial Sequence
  Sense Oligo
gaugaucuaauucacgagg

SEQ ID NO: 58120 - RNA, 19 nt, Artificial Sequence
  Antisense Oligo
ccucgugaauuagaucauc

SEQ ID NO: 58121 - RNA, 19 nt, Artificial Sequence
  Sense Oligo
augaucuaauucacgagga

SEQ ID NO: 58122 - RNA, 19 nt, Artificial Sequence
  Antisense Oligo
uccucgugaauuagaucau

SEQ ID NO: 58123 - RNA, 19 nt, Artificial Sequence
  Sense Oligo
ugaucuaauucacgaggac

SEQ ID NO: 58124 - RNA, 19 nt, Artificial Sequence
  Antisense Oligo
guccucgugaauuagauca

SEQ ID NO: 58125 - RNA, 19 nt, Artificial Sequence
  Sense Oligo
gaucuaauucacgaggaca

SEQ ID NO: 58126 - RNA, 19 nt, Artificial Sequence
  Antisense Oligo
uguccucgugaauuagauc

SEQ ID NO: 58127 - RNA, 19 nt, Artificial Sequence
  Sense Oligo
aucuaauucacgaggacau

SEQ ID NO: 58128 - RNA, 19 nt, Artificial Sequence
  Antisense Oligo
auguccucgugaauuagau

SEQ ID NO: 58129 - RNA, 19 nt, Artificial Sequence
  Sense Oligo
aauucacgaggacaucuau

SEQ ID NO: 58130 - RNA, 19 nt, Artificial Sequence
  Antisense Oligo
auagauguccucgugaauu

SEQ ID NO: 58131 - RNA, 19 nt, Artificial Sequence
  Sense Oligo
auucacgaggacaucuaug

SEQ ID NO: 58132 - RNA, 19 nt, Artificial Sequence
  Antisense Oligo
cauagauguccucgugaau

SEQ ID NO: 58133 - RNA, 19 nt, Artificial Sequence
  Sense Oligo
acaucuaugucugcaggac

SEQ ID NO: 58134 - RNA, 19 nt, Artificial Sequence
  Antisense Oligo
guccugcagacauagaugu

SEQ ID NO: 58135 - RNA, 19 nt, Artificial Sequence
  Sense Oligo
caucuaugucugcaggacc

SEQ ID NO: 58136 - RNA, 19 nt, Artificial Sequence
  Antisense Oligo
gguccugcagacauagaug

SEQ ID NO: 58137 - RNA, 19 nt, Artificial Sequence
  Sense Oligo
aucuaugucugcaggacca

SEQ ID NO: 58138 - RNA, 19 nt, Artificial Sequence
  Antisense Oligo
ugguccugcagacauagau

SEQ ID NO: 58139 - RNA, 19 nt, Artificial Sequence
  Sense Oligo
accugggcauccgucuguc

SEQ ID NO: 58140 - RNA, 19 nt, Artificial Sequence
  Antisense Oligo
gacagacggaugcccaggu

SEQ ID NO: 58141 - RNA, 19 nt, Artificial Sequence
  Sense Oligo
ccugggcauccgucugucu

SEQ ID NO: 58142 - RNA, 19 nt, Artificial Sequence
  Antisense Oligo
agacagacggaugcccagg

SEQ ID NO: 58143 - RNA, 19 nt, Artificial Sequence
  Sense Oligo
cugggcauccgucugucuc

SEQ ID NO: 58144 - RNA, 19 nt, Artificial Sequence
  Antisense Oligo
gagacagacggaugcccag

SEQ ID NO: 58145 - RNA, 19 nt, Artificial Sequence
  Sense Oligo
ugggcauccgucugucuca

SEQ ID NO: 58146 - RNA, 19 nt, Artificial Sequence
  Antisense Oligo
ugagacagacggaugccca

SEQ ID NO: 58147 - RNA, 19 nt, Artificial Sequence
  Sense Oligo
gggcauccgucugucucag

SEQ ID NO: 58148 - RNA, 19 nt, Artificial Sequence
  Antisense Oligo
cugagacagacggaugccc

SEQ ID NO: 58149 - RNA, 19 nt, Artificial Sequence
  Sense Oligo
ugccaucucacuugccagc

SEQ ID NO: 58150 - RNA, 19 nt, Artificial Sequence
  Antisense Oligo
gcuggcaagugagauggca

SEQ ID NO: 58151 - RNA, 19 nt, Artificial Sequence
  Sense Oligo
aucucacuugccagcaauc

SEQ ID NO: 58152 - RNA, 19 nt, Artificial Sequence
  Antisense Oligo
gauugcuggcaagugagau

SEQ ID NO: 58153 - RNA, 19 nt, Artificial Sequence
  Sense Oligo
ucucacuugccagcaaucu

SEQ ID NO: 58154 - RNA, 19 nt, Artificial Sequence
  Antisense Oligo
agauugcuggcaagugaga

SEQ ID NO: 58155 - RNA, 19 nt, Artificial Sequence
  Sense Oligo
cucacuugccagcaaucuu

SEQ ID NO: 58156 - RNA, 19 nt, Artificial Sequence
  Antisense Oligo
aagauugcuggcaagugag

SEQ ID NO: 58157 - RNA, 19 nt, Artificial Sequence
  Sense Oligo
ucacuugccagcaaucuua

SEQ ID NO: 58158 - RNA, 19 nt, Artificial Sequence
  Antisense Oligo
uaagauugcuggcaaguga

SEQ ID NO: 58159 - RNA, 19 nt, Artificial Sequence
  Sense Oligo
cacuugccagcaaucuuag

SEQ ID NO: 58160 - RNA, 19 nt, Artificial Sequence
  Antisense Oligo
cuaagauugcuggcaagug

SEQ ID NO: 58161 - RNA, 19 nt, Artificial Sequence
  Sense Oligo
acuugccagcaaucuuagc

SEQ ID NO: 58162 - RNA, 19 nt, Artificial Sequence
  Antisense Oligo
gcuaagauugcuggcaagu

SEQ ID NO: 58163 - RNA, 19 nt, Artificial Sequence
  Sense Oligo
cuugccagcaaucuuagcu

SEQ ID NO: 58164 - RNA, 19 nt, Artificial Sequence
  Antisense Oligo
agcuaagauugcuggcaag

SEQ ID NO: 58165 - RNA, 19 nt, Artificial Sequence
  Sense Oligo
uugccagcaaucuuagcuu

SEQ ID NO: 58166 - RNA, 19 nt, Artificial Sequence
  Antisense Oligo
aagcuaagauugcuggcaa

SEQ ID NO: 58167 - RNA, 19 nt, Artificial Sequence
  Sense Oligo
aaauaccagacuucagaau

SEQ ID NO: 58168 - RNA, 19 nt, Artificial Sequence
  Antisense Oligo
auucugaagucugguauuu

SEQ ID NO: 58169 - RNA, 19 nt, Artificial Sequence
  Sense Oligo
auaccagacuucagaaucc

SEQ ID NO: 58170 - RNA, 19 nt, Artificial Sequence
  Antisense Oligo
ggauucugaagucugguau

SEQ ID NO: 58171 - RNA, 19 nt, Artificial Sequence
  Sense Oligo
accagacuucagaauccag

SEQ ID NO: 58172 - RNA, 19 nt, Artificial Sequence
  Antisense Oligo
cuggauucugaagucuggu

SEQ ID NO: 58173 - RNA, 19 nt, Artificial Sequence
  Sense Oligo
agacuucagaauccaggua

SEQ ID NO: 58174 - RNA, 19 nt, Artificial Sequence
  Antisense Oligo
uaccuggauucugaagucu

SEQ ID NO: 58175 - RNA, 19 nt, Artificial Sequence
  Sense Oligo
gacuucagaauccagguac

SEQ ID NO: 58176 - RNA, 19 nt, Artificial Sequence
  Antisense Oligo
guaccuggauucugaaguc

SEQ ID NO: 58177 - RNA, 19 nt, Artificial Sequence
  Sense Oligo
acuucagaauccagguaca

SEQ ID NO: 58178 - RNA, 19 nt, Artificial Sequence
  Antisense Oligo
uguaccuggauucugaagu

SEQ ID NO: 58179 - RNA, 19 nt, Artificial Sequence
  Sense Oligo
agaugaaugugguucuaaa

SEQ ID NO: 58180 - RNA, 19 nt, Artificial Sequence
  Antisense Oligo
uuuagaaccacauucaucu

SEQ ID NO: 58181 - RNA, 19 nt, Artificial Sequence
  Sense Oligo
gaugaaugugguucuaaau

SEQ ID NO: 58182 - RNA, 19 nt, Artificial Sequence
  Antisense Oligo
auuuagaaccacauucauc

SEQ ID NO: 58183 - RNA, 19 nt, Artificial Sequence
  Sense Oligo
augaaugugguucuaaaug

SEQ ID NO: 58184 - RNA, 19 nt, Artificial Sequence
  Antisense Oligo
cauuuagaaccacauucau

SEQ ID NO: 58185 - RNA, 19 nt, Artificial Sequence
  Sense Oligo
ugaaugugguucuaaaugc

SEQ ID NO: 58186 - RNA, 19 nt, Artificial Sequence
  Antisense Oligo
gcauuuagaaccacauuca

SEQ ID NO: 58187 - RNA, 19 nt, Artificial Sequence
  Sense Oligo
gaaugugguucuaaaugcu

SEQ ID NO: 58188 - RNA, 19 nt, Artificial Sequence
  Antisense Oligo
agcauuuagaaccacauuc

SEQ ID NO: 58189 - RNA, 19 nt, Artificial Sequence
  Sense Oligo
aaugugguucuaaaugcuc

SEQ ID NO: 58190 - RNA, 19 nt, Artificial Sequence
  Antisense Oligo
gagcauuuagaaccacauu

SEQ ID NO: 58191 - RNA, 19 nt, Artificial Sequence
  Sense Oligo
augugguucuaaaugcucc

SEQ ID NO: 58192 - RNA, 19 nt, Artificial Sequence
  Antisense Oligo
ggagcauuuagaaccacau

SEQ ID NO: 58193 - RNA, 19 nt, Artificial Sequence
  Sense Oligo
gggccucacauucugacug

SEQ ID NO: 58194 - RNA, 19 nt, Artificial Sequence
  Antisense Oligo
cagucagaaugugaggccc

SEQ ID NO: 58195 - RNA, 19 nt, Artificial Sequence
  Sense Oligo
ggccucacauucugacugu

SEQ ID NO: 58196 - RNA, 19 nt, Artificial Sequence
  Antisense Oligo
acagucagaaugugaggcc

SEQ ID NO: 58197 - RNA, 19 nt, Artificial Sequence
  Sense Oligo
uguucccugcagucacagc

SEQ ID NO: 58198 - RNA, 19 nt, Artificial Sequence
  Antisense Oligo
gcugugacugcagggaaca

SEQ ID NO: 58199 - RNA, 19 nt, Artificial Sequence
  Sense Oligo
uucccugcagucacagcuu

SEQ ID NO: 58200 - RNA, 19 nt, Artificial Sequence
  Antisense Oligo
aagcugugacugcagggaa

SEQ ID NO: 58201 - RNA, 19 nt, Artificial Sequence
  Sense Oligo
ucccugcagucacagcuua

SEQ ID NO: 58202 - RNA, 19 nt, Artificial Sequence
  Antisense Oligo
uaagcugugacugcaggga

SEQ ID NO: 58203 - RNA, 19 nt, Artificial Sequence
  Sense Oligo
cccugcagucacagcuuaa

SEQ ID NO: 58204 - RNA, 19 nt, Artificial Sequence
  Antisense Oligo
uuaagcugugacugcaggg

SEQ ID NO: 58205 - RNA, 19 nt, Artificial Sequence
  Sense Oligo
ccugcagucacagcuuaaa

SEQ ID NO: 58206 - RNA, 19 nt, Artificial Sequence
  Antisense Oligo
uuuaagcugugacugcagg

SEQ ID NO: 58207 - RNA, 19 nt, Artificial Sequence
  Sense Oligo
cugcagucacagcuuaaaa

SEQ ID NO: 58208 - RNA, 19 nt, Artificial Sequence
  Antisense Oligo
uuuuaagcugugacugcag

SEQ ID NO: 58209 - RNA, 19 nt, Artificial Sequence
  Sense Oligo
ugcagucacagcuuaaaau

SEQ ID NO: 58210 - RNA, 19 nt, Artificial Sequence
  Antisense Oligo
auuuuaagcugugacugca

SEQ ID NO: 58211 - RNA, 19 nt, Artificial Sequence
  Sense Oligo
gcagucacagcuuaaaaua

SEQ ID NO: 58212 - RNA, 19 nt, Artificial Sequence
  Antisense Oligo
uauuuuaagcugugacugc

SEQ ID NO: 58213 - RNA, 19 nt, Artificial Sequence
  Sense Oligo
cagucacagcuuaaaauac

SEQ ID NO: 58214 - RNA, 19 nt, Artificial Sequence
  Antisense Oligo
guauuuuaagcugugacug

SEQ ID NO: 58215 - RNA, 19 nt, Artificial Sequence
  Sense Oligo
agucacagcuuaaaauacu

SEQ ID NO: 58216 - RNA, 19 nt, Artificial Sequence
  Antisense Oligo
aguauuuuaagcugugacu

SEQ ID NO: 58217 - RNA, 19 nt, Artificial Sequence
  Sense Oligo
gucacagcuuaaaauacuu

SEQ ID NO: 58218 - RNA, 19 nt, Artificial Sequence
  Antisense Oligo
aaguauuuuaagcugugac

SEQ ID NO: 58219 - RNA, 19 nt, Artificial Sequence
  Sense Oligo
auacuuucauguuaucucc

SEQ ID NO: 58220 - RNA, 19 nt, Artificial Sequence
  Antisense Oligo
ggagauaacaugaaaguau

SEQ ID NO: 58221 - RNA, 19 nt, Artificial Sequence
  Sense Oligo
uacuuucauguuaucucca

SEQ ID NO: 58222 - RNA, 19 nt, Artificial Sequence
  Antisense Oligo
uggagauaacaugaaagua

SEQ ID NO: 58223 - RNA, 19 nt, Artificial Sequence
  Sense Oligo
acuuucauguuaucuccag

SEQ ID NO: 58224 - RNA, 19 nt, Artificial Sequence
  Antisense Oligo
cuggagauaacaugaaagu

SEQ ID NO: 58225 - RNA, 19 nt, Artificial Sequence
  Sense Oligo
cuuucauguuaucuccaga

SEQ ID NO: 58226 - RNA, 19 nt, Artificial Sequence
  Antisense Oligo
ucuggagauaacaugaaag

SEQ ID NO: 58227 - RNA, 19 nt, Artificial Sequence
  Sense Oligo
uuucauguuaucuccagaa

SEQ ID NO: 58228 - RNA, 19 nt, Artificial Sequence
  Antisense Oligo
uucuggagauaacaugaaa

SEQ ID NO: 58229 - RNA, 19 nt, Artificial Sequence
  Sense Oligo
ucacaguguccuccauccu

SEQ ID NO: 58230 - RNA, 19 nt, Artificial Sequence
  Antisense Oligo
aggauggaggacacuguga

SEQ ID NO: 58231 - RNA, 19 nt, Artificial Sequence
  Sense Oligo
cacaguguccuccauccuc

SEQ ID NO: 58232 - RNA, 19 nt, Artificial Sequence
  Antisense Oligo
gaggauggaggacacugug

SEQ ID NO: 58233 - RNA, 19 nt, Artificial Sequence
  Sense Oligo
acaguguccuccauccucu

SEQ ID NO: 58234 - RNA, 19 nt, Artificial Sequence
  Antisense Oligo
agaggauggaggacacugu

SEQ ID NO: 58235 - RNA, 19 nt, Artificial Sequence
  Sense Oligo
uguccuccauccucuaaua

SEQ ID NO: 58236 - RNA, 19 nt, Artificial Sequence
  Antisense Oligo
uauuagaggauggaggaca

SEQ ID NO: 58237 - RNA, 19 nt, Artificial Sequence
  Sense Oligo
guccuccauccucuaauag

SEQ ID NO: 58238 - RNA, 19 nt, Artificial Sequence
  Antisense Oligo
cuauuagaggauggaggac

SEQ ID NO: 58239 - RNA, 19 nt, Artificial Sequence
  Sense Oligo
uccuccauccucuaauagu

SEQ ID NO: 58240 - RNA, 19 nt, Artificial Sequence
  Antisense Oligo
acuauuagaggauggagga

SEQ ID NO: 58241 - RNA, 19 nt, Artificial Sequence
  Sense Oligo
ccuccauccucuaauaguu

SEQ ID NO: 58242 - RNA, 19 nt, Artificial Sequence
  Antisense Oligo
aacuauuagaggauggagg

SEQ ID NO: 58243 - RNA, 19 nt, Artificial Sequence
  Sense Oligo
uccauccucuaauaguuuu

SEQ ID NO: 58244 - RNA, 19 nt, Artificial Sequence
  Antisense Oligo
aaaacuauuagaggaugga

SEQ ID NO: 58245 - RNA, 19 nt, Artificial Sequence
  Sense Oligo
ccauccucuaauaguuuug

SEQ ID NO: 58246 - RNA, 19 nt, Artificial Sequence
  Antisense Oligo
caaaacuauuagaggaugg

SEQ ID NO: 58247 - RNA, 19 nt, Artificial Sequence
  Sense Oligo
cauccucuaauaguuuugc

SEQ ID NO: 58248 - RNA, 19 nt, Artificial Sequence
  Antisense Oligo
gcaaaacuauuagaggaug

SEQ ID NO: 58249 - RNA, 19 nt, Artificial Sequence
  Sense Oligo
auccucuaauaguuuugcc

SEQ ID NO: 58250 - RNA, 19 nt, Artificial Sequence
  Antisense Oligo
ggcaaaacuauuagaggau

SEQ ID NO: 58251 - RNA, 19 nt, Artificial Sequence
  Sense Oligo
uccucuaauaguuuugcca

SEQ ID NO: 58252 - RNA, 19 nt, Artificial Sequence
  Antisense Oligo
uggcaaaacuauuagagga

SEQ ID NO: 58253 - RNA, 19 nt, Artificial Sequence
  Sense Oligo
ccucuaauaguuuugccac

SEQ ID NO: 58254 - RNA, 19 nt, Artificial Sequence
  Antisense Oligo
guggcaaaacuauuagagg

SEQ ID NO: 58255 - RNA, 19 nt, Artificial Sequence
  Sense Oligo
agagcaucggccacacugc

SEQ ID NO: 58256 - RNA, 19 nt, Artificial Sequence
  Antisense Oligo
gcaguguggccgaugcucu

SEQ ID NO: 58257 - RNA, 19 nt, Artificial Sequence
  Sense Oligo
gagcaucggccacacugca

SEQ ID NO: 58258 - RNA, 19 nt, Artificial Sequence
  Antisense Oligo
ugcaguguggccgaugcuc

SEQ ID NO: 58259 - RNA, 19 nt, Artificial Sequence
  Sense Oligo
agcaucggccacacugcau

SEQ ID NO: 58260 - RNA, 19 nt, Artificial Sequence
  Antisense Oligo
augcaguguggccgaugcu

SEQ ID NO: 58261 - RNA, 19 nt, Artificial Sequence
  Sense Oligo
gcaucggccacacugcauc

SEQ ID NO: 58262 - RNA, 19 nt, Artificial Sequence
  Antisense Oligo
gaugcaguguggccgaugc

SEQ ID NO: 58263 - RNA, 19 nt, Artificial Sequence
  Sense Oligo
caucggccacacugcaucu

SEQ ID NO: 58264 - RNA, 19 nt, Artificial Sequence
  Antisense Oligo
agaugcaguguggccgaug

SEQ ID NO: 58265 - RNA, 19 nt, Artificial Sequence
  Sense Oligo
gccacacugcaucuccucu

SEQ ID NO: 58266 - RNA, 19 nt, Artificial Sequence
  Antisense Oligo
agaggagaugcaguguggc

SEQ ID NO: 58267 - RNA, 19 nt, Artificial Sequence
  Sense Oligo
ccacacugcaucuccucuc

SEQ ID NO: 58268 - RNA, 19 nt, Artificial Sequence
  Antisense Oligo
gagaggagaugcagugugg

SEQ ID NO: 58269 - RNA, 19 nt, Artificial Sequence
  Sense Oligo
cacacugcaucuccucucu

SEQ ID NO: 58270 - RNA, 19 nt, Artificial Sequence
  Antisense Oligo
agagaggagaugcagugug

SEQ ID NO: 58271 - RNA, 19 nt, Artificial Sequence
  Sense Oligo
acacugcaucuccucucug

SEQ ID NO: 58272 - RNA, 19 nt, Artificial Sequence
  Antisense Oligo
cagagaggagaugcagugu

SEQ ID NO: 58273 - RNA, 19 nt, Artificial Sequence
  Sense Oligo
gcaucuccucucugccgga

SEQ ID NO: 58274 - RNA, 19 nt, Artificial Sequence
  Antisense Oligo
uccggcagagaggagaugc

SEQ ID NO: 58275 - RNA, 19 nt, Artificial Sequence
  Sense Oligo
caucuccucucugccggac

SEQ ID NO: 58276 - RNA, 19 nt, Artificial Sequence
  Antisense Oligo
guccggcagagaggagaug

SEQ ID NO: 58277 - RNA, 19 nt, Artificial Sequence
  Sense Oligo
aucuccucucugccggacu

SEQ ID NO: 58278 - RNA, 19 nt, Artificial Sequence
  Antisense Oligo
aguccggcagagaggagau

SEQ ID NO: 58279 - RNA, 19 nt, Artificial Sequence
  Sense Oligo
ccucucugccggacuuuag

SEQ ID NO: 58280 - RNA, 19 nt, Artificial Sequence
  Antisense Oligo
cuaaaguccggcagagagg

SEQ ID NO: 58281 - RNA, 19 nt, Artificial Sequence
  Sense Oligo
cucucugccggacuuuaga

SEQ ID NO: 58282 - RNA, 19 nt, Artificial Sequence
  Antisense Oligo
ucuaaaguccggcagagag

SEQ ID NO: 58283 - RNA, 19 nt, Artificial Sequence
  Sense Oligo
ucucugccggacuuuagau

SEQ ID NO: 58284 - RNA, 19 nt, Artificial Sequence
  Antisense Oligo
aucuaaaguccggcagaga

SEQ ID NO: 58285 - RNA, 19 nt, Artificial Sequence
  Sense Oligo
cucugccggacuuuagauc

SEQ ID NO: 58286 - RNA, 19 nt, Artificial Sequence
  Antisense Oligo
gaucuaaaguccggcagag

SEQ ID NO: 58287 - RNA, 19 nt, Artificial Sequence
  Sense Oligo
ucugccggacuuuagaucc

SEQ ID NO: 58288 - RNA, 19 nt, Artificial Sequence
  Antisense Oligo
ggaucuaaaguccggcaga

SEQ ID NO: 58289 - RNA, 19 nt, Artificial Sequence
  Sense Oligo
cugccggacuuuagauccc

SEQ ID NO: 58290 - RNA, 19 nt, Artificial Sequence
  Antisense Oligo
gggaucuaaaguccggcag

SEQ ID NO: 58291 - RNA, 19 nt, Artificial Sequence
  Sense Oligo
ugccggacuuuagaucccg

SEQ ID NO: 58292 - RNA, 19 nt, Artificial Sequence
  Antisense Oligo
cgggaucuaaaguccggca

SEQ ID NO: 58293 - RNA, 19 nt, Artificial Sequence
  Sense Oligo
cggacuuuagaucccgguu

SEQ ID NO: 58294 - RNA, 19 nt, Artificial Sequence
  Antisense Oligo
aaccgggaucuaaaguccg

SEQ ID NO: 58295 - RNA, 19 nt, Artificial Sequence
  Sense Oligo
ggacuuuagaucccgguuu

SEQ ID NO: 58296 - RNA, 19 nt, Artificial Sequence
  Antisense Oligo
aaaccgggaucuaaagucc

SEQ ID NO: 58297 - RNA, 19 nt, Artificial Sequence
  Sense Oligo
gacuuuagaucccgguuuu

SEQ ID NO: 58298 - RNA, 19 nt, Artificial Sequence
  Antisense Oligo
aaaaccgggaucuaaaguc

SEQ ID NO: 58299 - RNA, 19 nt, Artificial Sequence
  Sense Oligo
gacacccaugggaugccga

SEQ ID NO: 58300 - RNA, 19 nt, Artificial Sequence
  Antisense Oligo
ucggcaucccauggguguc

SEQ ID NO: 58301 - RNA, 19 nt, Artificial Sequence
  Sense Oligo
acacccaugggaugccgac

SEQ ID NO: 58302 - RNA, 19 nt, Artificial Sequence
  Antisense Oligo
gucggcaucccaugggugu

SEQ ID NO: 58303 - RNA, 19 nt, Artificial Sequence
  Sense Oligo
cacccaugggaugccgacu

SEQ ID NO: 58304 - RNA, 19 nt, Artificial Sequence
  Antisense Oligo
agucggcaucccaugggug

SEQ ID NO: 58305 - RNA, 19 nt, Artificial Sequence
  Sense Oligo
acccaugggaugccgacug

SEQ ID NO: 58306 - RNA, 19 nt, Artificial Sequence
  Antisense Oligo
cagucggcaucccaugggu

SEQ ID NO: 58307 - RNA, 19 nt, Artificial Sequence
  Sense Oligo
cccaugggaugccgacugu

SEQ ID NO: 58308 - RNA, 19 nt, Artificial Sequence
  Antisense Oligo
acagucggcaucccauggg

SEQ ID NO: 58309 - RNA, 19 nt, Artificial Sequence
  Sense Oligo
ccaugggaugccgacuguc

SEQ ID NO: 58310 - RNA, 19 nt, Artificial Sequence
  Antisense Oligo
gacagucggcaucccaugg

SEQ ID NO: 58311 - RNA, 19 nt, Artificial Sequence
  Sense Oligo
caugggaugccgacugucc

SEQ ID NO: 58312 - RNA, 19 nt, Artificial Sequence
  Antisense Oligo
ggacagucggcaucccaug

SEQ ID NO: 58313 - RNA, 19 nt, Artificial Sequence
  Sense Oligo
augggaugccgacuguccu

SEQ ID NO: 58314 - RNA, 19 nt, Artificial Sequence
  Antisense Oligo
aggacagucggcaucccau

SEQ ID NO: 58315 - RNA, 19 nt, Artificial Sequence
  Sense Oligo
ugggaugccgacuguccuc

SEQ ID NO: 58316 - RNA, 19 nt, Artificial Sequence
  Antisense Oligo
gaggacagucggcauccca

SEQ ID NO: 58317 - RNA, 19 nt, Artificial Sequence
  Sense Oligo
aacucuagcuguucuuagc

SEQ ID NO: 58318 - RNA, 19 nt, Artificial Sequence
  Antisense Oligo
gcuaagaacagcuagaguu

SEQ ID NO: 58319 - RNA, 19 nt, Artificial Sequence
  Sense Oligo
acucuagcuguucuuagcc

SEQ ID NO: 58320 - RNA, 19 nt, Artificial Sequence
  Antisense Oligo
ggcuaagaacagcuagagu

SEQ ID NO: 58321 - RNA, 19 nt, Artificial Sequence
  Sense Oligo
cucuagcuguucuuagccc

SEQ ID NO: 58322 - RNA, 19 nt, Artificial Sequence
  Antisense Oligo
gggcuaagaacagcuagag

SEQ ID NO: 58323 - RNA, 19 nt, Artificial Sequence
  Sense Oligo
ucuagcuguucuuagccca

SEQ ID NO: 58324 - RNA, 19 nt, Artificial Sequence
  Antisense Oligo
ugggcuaagaacagcuaga

SEQ ID NO: 58325 - RNA, 19 nt, Artificial Sequence
  Sense Oligo
cuagcuguucuuagcccaa

SEQ ID NO: 58326 - RNA, 19 nt, Artificial Sequence
  Antisense Oligo
uugggcuaagaacagcuag

SEQ ID NO: 58327 - RNA, 19 nt, Artificial Sequence
  Sense Oligo
uagcuguucuuagcccaac

SEQ ID NO: 58328 - RNA, 19 nt, Artificial Sequence
  Antisense Oligo
guugggcuaagaacagcua

SEQ ID NO: 58329 - RNA, 19 nt, Artificial Sequence
  Sense Oligo
uguucuuagcccaaccgcu

SEQ ID NO: 58330 - RNA, 19 nt, Artificial Sequence
  Antisense Oligo
agcgguugggcuaagaaca

SEQ ID NO: 58331 - RNA, 19 nt, Artificial Sequence
  Sense Oligo
guucuuagcccaaccgcuc

SEQ ID NO: 58332 - RNA, 19 nt, Artificial Sequence
  Antisense Oligo
gagcgguugggcuaagaac

SEQ ID NO: 58333 - RNA, 19 nt, Artificial Sequence
  Sense Oligo
uucuuagcccaaccgcucc

SEQ ID NO: 58334 - RNA, 19 nt, Artificial Sequence
  Antisense Oligo
ggagcgguugggcuaagaa

SEQ ID NO: 58335 - RNA, 19 nt, Artificial Sequence
  Sense Oligo
uagcccaaccgcuccucuc

SEQ ID NO: 58336 - RNA, 19 nt, Artificial Sequence
  Antisense Oligo
gagaggagcgguugggcua

SEQ ID NO: 58337 - RNA, 19 nt, Artificial Sequence
  Sense Oligo
ccaaccgcuccucuccuga

SEQ ID NO: 58338 - RNA, 19 nt, Artificial Sequence
  Antisense Oligo
ucaggagaggagcgguugg

SEQ ID NO: 58339 - RNA, 19 nt, Artificial Sequence
  Sense Oligo
caaccgcuccucuccugac

SEQ ID NO: 58340 - RNA, 19 nt, Artificial Sequence
  Antisense Oligo
gucaggagaggagcgguug

SEQ ID NO: 58341 - RNA, 19 nt, Artificial Sequence
  Sense Oligo
aaccgcuccucuccugaca

SEQ ID NO: 58342 - RNA, 19 nt, Artificial Sequence
  Antisense Oligo
ugucaggagaggagcgguu

SEQ ID NO: 58343 - RNA, 19 nt, Artificial Sequence
  Sense Oligo
aaaagacggguccaggccu

SEQ ID NO: 58344 - RNA, 19 nt, Artificial Sequence
  Antisense Oligo
aggccuggacccgucuuuu

SEQ ID NO: 58345 - RNA, 19 nt, Artificial Sequence
  Sense Oligo
aaagacggguccaggccug

SEQ ID NO: 58346 - RNA, 19 nt, Artificial Sequence
  Antisense Oligo
caggccuggacccgucuuu

SEQ ID NO: 58347 - RNA, 19 nt, Artificial Sequence
  Sense Oligo
gggaucagcaucaauacca

SEQ ID NO: 58348 - RNA, 19 nt, Artificial Sequence
  Antisense Oligo
ugguauugaugcugauccc

SEQ ID NO: 58349 - RNA, 19 nt, Artificial Sequence
  Sense Oligo
ggaucagcaucaauaccac

SEQ ID NO: 58350 - RNA, 19 nt, Artificial Sequence
  Antisense Oligo
gugguauugaugcugaucc

SEQ ID NO: 58351 - RNA, 19 nt, Artificial Sequence
  Sense Oligo
gaucagcaucaauaccaca

SEQ ID NO: 58352 - RNA, 19 nt, Artificial Sequence
  Antisense Oligo
ugugguauugaugcugauc

SEQ ID NO: 58353 - RNA, 19 nt, Artificial Sequence
  Sense Oligo
aucagcaucaauaccacac

SEQ ID NO: 58354 - RNA, 19 nt, Artificial Sequence
  Antisense Oligo
gugugguauugaugcugau

SEQ ID NO: 58355 - RNA, 19 nt, Artificial Sequence
  Sense Oligo
agaaugcggucgggucugg

SEQ ID NO: 58356 - RNA, 19 nt, Artificial Sequence
  Antisense Oligo
ccagacccgaccgcauucu

SEQ ID NO: 58357 - RNA, 19 nt, Artificial Sequence
  Sense Oligo
gaaugcggucgggucuggu

SEQ ID NO: 58358 - RNA, 19 nt, Artificial Sequence
  Antisense Oligo
accagacccgaccgcauuc

SEQ ID NO: 58359 - RNA, 19 nt, Artificial Sequence
  Sense Oligo
aaugcggucgggucugguc

SEQ ID NO: 58360 - RNA, 19 nt, Artificial Sequence
  Antisense Oligo
gaccagacccgaccgcauu

SEQ ID NO: 58361 - RNA, 19 nt, Artificial Sequence
  Sense Oligo
caugguccaggcuuugugg

SEQ ID NO: 58362 - RNA, 19 nt, Artificial Sequence
  Antisense Oligo
ccacaaagccuggaccaug

SEQ ID NO: 58363 - RNA, 19 nt, Artificial Sequence
  Sense Oligo
cagcaaguacucuucacau

SEQ ID NO: 58364 - RNA, 19 nt, Artificial Sequence
  Antisense Oligo
augugaagaguacuugcug

SEQ ID NO: 58365 - RNA, 19 nt, Artificial Sequence
  Sense Oligo
agcaaguacucuucacaua

SEQ ID NO: 58366 - RNA, 19 nt, Artificial Sequence
  Antisense Oligo
uaugugaagaguacuugcu

SEQ ID NO: 58367 - RNA, 19 nt, Artificial Sequence
  Sense Oligo
gcaaguacucuucacauaa

SEQ ID NO: 58368 - RNA, 19 nt, Artificial Sequence
  Antisense Oligo
uuaugugaagaguacuugc

SEQ ID NO: 58369 - RNA, 19 nt, Artificial Sequence
  Sense Oligo
caaguacucuucacauaac

SEQ ID NO: 58370 - RNA, 19 nt, Artificial Sequence
  Antisense Oligo
guuaugugaagaguacuug

SEQ ID NO: 58371 - RNA, 19 nt, Artificial Sequence
  Sense Oligo
aguacucuucacauaacuc

SEQ ID NO: 58372 - RNA, 19 nt, Artificial Sequence
  Antisense Oligo
gaguuaugugaagaguacu

SEQ ID NO: 58373 - RNA, 19 nt, Artificial Sequence
  Sense Oligo
guacucuucacauaacucu

SEQ ID NO: 58374 - RNA, 19 nt, Artificial Sequence
  Antisense Oligo
agaguuaugugaagaguac

SEQ ID NO: 58375 - RNA, 19 nt, Artificial Sequence
  Sense Oligo
uacucuucacauaacucuc

SEQ ID NO: 58376 - RNA, 19 nt, Artificial Sequence
  Antisense Oligo
gagaguuaugugaagagua

SEQ ID NO: 58377 - RNA, 19 nt, Artificial Sequence
  Sense Oligo
acucuucacauaacucucu

SEQ ID NO: 58378 - RNA, 19 nt, Artificial Sequence
  Antisense Oligo
agagaguuaugugaagagu

SEQ ID NO: 58379 - RNA, 19 nt, Artificial Sequence
  Sense Oligo
cucuucacauaacucucuu

SEQ ID NO: 58380 - RNA, 19 nt, Artificial Sequence
  Antisense Oligo
aagagaguuaugugaagag

SEQ ID NO: 58381 - RNA, 19 nt, Artificial Sequence
  Sense Oligo
ucuucacauaacucucuuc

SEQ ID NO: 58382 - RNA, 19 nt, Artificial Sequence
  Antisense Oligo
gaagagaguuaugugaaga

SEQ ID NO: 58383 - RNA, 19 nt, Artificial Sequence
  Sense Oligo
cuucacauaacucucuucu

SEQ ID NO: 58384 - RNA, 19 nt, Artificial Sequence
  Antisense Oligo
agaagagaguuaugugaag

SEQ ID NO: 58385 - RNA, 19 nt, Artificial Sequence
  Sense Oligo
uucacauaacucucuucuc

SEQ ID NO: 58386 - RNA, 19 nt, Artificial Sequence
  Antisense Oligo
gagaagagaguuaugugaa

SEQ ID NO: 58387 - RNA, 19 nt, Artificial Sequence
  Sense Oligo
ucacauaacucucuucuca

SEQ ID NO: 58388 - RNA, 19 nt, Artificial Sequence
  Antisense Oligo
ugagaagagaguuauguga

SEQ ID NO: 58389 - RNA, 19 nt, Artificial Sequence
  Sense Oligo
cacauaacucucuucucag

SEQ ID NO: 58390 - RNA, 19 nt, Artificial Sequence
  Antisense Oligo
cugagaagagaguuaugug

SEQ ID NO: 58391 - RNA, 19 nt, Artificial Sequence
  Sense Oligo
uaacucucuucucagccgu

SEQ ID NO: 58392 - RNA, 19 nt, Artificial Sequence
  Antisense Oligo
acggcugagaagagaguua

SEQ ID NO: 58393 - RNA, 19 nt, Artificial Sequence
  Sense Oligo
aacucucuucucagccgua

SEQ ID NO: 58394 - RNA, 19 nt, Artificial Sequence
  Antisense Oligo
uacggcugagaagagaguu

SEQ ID NO: 58395 - RNA, 19 nt, Artificial Sequence
  Sense Oligo
acucucuucucagccguaa

SEQ ID NO: 58396 - RNA, 19 nt, Artificial Sequence
  Antisense Oligo
uuacggcugagaagagagu

SEQ ID NO: 58397 - RNA, 19 nt, Artificial Sequence
  Sense Oligo
cucucuucucagccguaag

SEQ ID NO: 58398 - RNA, 19 nt, Artificial Sequence
  Antisense Oligo
cuuacggcugagaagagag

SEQ ID NO: 58399 - RNA, 19 nt, Artificial Sequence
  Sense Oligo
ucucuucucagccguaagc

SEQ ID NO: 58400 - RNA, 19 nt, Artificial Sequence
  Antisense Oligo
gcuuacggcugagaagaga

SEQ ID NO: 58401 - RNA, 19 nt, Artificial Sequence
  Sense Oligo
cucuucucagccguaagcc

SEQ ID NO: 58402 - RNA, 19 nt, Artificial Sequence
  Antisense Oligo
ggcuuacggcugagaagag

SEQ ID NO: 58403 - RNA, 19 nt, Artificial Sequence
  Sense Oligo
ucuucucagccguaagccu

SEQ ID NO: 58404 - RNA, 19 nt, Artificial Sequence
  Antisense Oligo
aggcuuacggcugagaaga

SEQ ID NO: 58405 - RNA, 19 nt, Artificial Sequence
  Sense Oligo
cucagccguaagccucacu

SEQ ID NO: 58406 - RNA, 19 nt, Artificial Sequence
  Antisense Oligo
agugaggcuuacggcugag

SEQ ID NO: 58407 - RNA, 19 nt, Artificial Sequence
  Sense Oligo
ucagccguaagccucacuc

SEQ ID NO: 58408 - RNA, 19 nt, Artificial Sequence
  Antisense Oligo
gagugaggcuuacggcuga

SEQ ID NO: 58409 - RNA, 19 nt, Artificial Sequence
  Sense Oligo
cguaagccucacuccaagu

SEQ ID NO: 58410 - RNA, 19 nt, Artificial Sequence
  Antisense Oligo
acuuggagugaggcuuacg

SEQ ID NO: 58411 - RNA, 19 nt, Artificial Sequence
  Sense Oligo
agccucagccucugucuug

SEQ ID NO: 58412 - RNA, 19 nt, Artificial Sequence
  Antisense Oligo
caagacagaggcugaggcu

SEQ ID NO: 58413 - RNA, 19 nt, Artificial Sequence
  Sense Oligo
gccucagccucugucuugu

SEQ ID NO: 58414 - RNA, 19 nt, Artificial Sequence
  Antisense Oligo
acaagacagaggcugaggc

SEQ ID NO: 58415 - RNA, 19 nt, Artificial Sequence
  Sense Oligo
uucucucguucuuuccaga

SEQ ID NO: 58416 - RNA, 19 nt, Artificial Sequence
  Antisense Oligo
ucuggaaagaacgagagaa

SEQ ID NO: 58417 - RNA, 19 nt, Artificial Sequence
  Sense Oligo
acguggugacaugugaccg

SEQ ID NO: 58418 - RNA, 19 nt, Artificial Sequence
  Antisense Oligo
cggucacaugucaccacgu

SEQ ID NO: 58419 - RNA, 19 nt, Artificial Sequence
  Sense Oligo
cguggugacaugugaccga

SEQ ID NO: 58420 - RNA, 19 nt, Artificial Sequence
  Antisense Oligo
ucggucacaugucaccacg

SEQ ID NO: 58421 - RNA, 19 nt, Artificial Sequence
  Sense Oligo
guggugacaugugaccgag

SEQ ID NO: 58422 - RNA, 19 nt, Artificial Sequence
  Antisense Oligo
cucggucacaugucaccac

SEQ ID NO: 58423 - RNA, 19 nt, Artificial Sequence
  Sense Oligo
uggugacaugugaccgagg

SEQ ID NO: 58424 - RNA, 19 nt, Artificial Sequence
  Antisense Oligo
ccucggucacaugucacca

SEQ ID NO: 58425 - RNA, 19 nt, Artificial Sequence
  Sense Oligo
ggugacaugugaccgaggg

SEQ ID NO: 58426 - RNA, 19 nt, Artificial Sequence
  Antisense Oligo
cccucggucacaugucacc

SEQ ID NO: 58427 - RNA, 19 nt, Artificial Sequence
  Sense Oligo
gugacaugugaccgagggc

SEQ ID NO: 58428 - RNA, 19 nt, Artificial Sequence
  Antisense Oligo
gcccucggucacaugucac

SEQ ID NO: 58429 - RNA, 19 nt, Artificial Sequence
  Sense Oligo
caguggucuuccuccuuau

SEQ ID NO: 58430 - RNA, 19 nt, Artificial Sequence
  Antisense Oligo
auaaggaggaagaccacug

SEQ ID NO: 58431 - RNA, 19 nt, Artificial Sequence
  Sense Oligo
aguggucuuccuccuuauc

SEQ ID NO: 58432 - RNA, 19 nt, Artificial Sequence
  Antisense Oligo
gauaaggaggaagaccacu

SEQ ID NO: 58433 - RNA, 19 nt, Artificial Sequence
  Sense Oligo
guggucuuccuccuuaucc

SEQ ID NO: 58434 - RNA, 19 nt, Artificial Sequence
  Antisense Oligo
ggauaaggaggaagaccac

SEQ ID NO: 58435 - RNA, 19 nt, Artificial Sequence
  Sense Oligo
ggucuuccuccuuauccgg

SEQ ID NO: 58436 - RNA, 19 nt, Artificial Sequence
  Antisense Oligo
ccggauaaggaggaagacc

SEQ ID NO: 58437 - RNA, 19 nt, Artificial Sequence
  Sense Oligo
gucuuccuccuuauccggc

SEQ ID NO: 58438 - RNA, 19 nt, Artificial Sequence
  Antisense Oligo
gccggauaaggaggaagac

SEQ ID NO: 58439 - RNA, 19 nt, Artificial Sequence
  Sense Oligo
ucuuccuccuuauccggcu

SEQ ID NO: 58440 - RNA, 19 nt, Artificial Sequence
  Antisense Oligo
agccggauaaggaggaaga

SEQ ID NO: 58441 - RNA, 19 nt, Artificial Sequence
  Sense Oligo
cuuccuccuuauccggcua

SEQ ID NO: 58442 - RNA, 19 nt, Artificial Sequence
  Antisense Oligo
uagccggauaaggaggaag

SEQ ID NO: 58443 - RNA, 19 nt, Artificial Sequence
  Sense Oligo
uuccuccuuauccggcuac

SEQ ID NO: 58444 - RNA, 19 nt, Artificial Sequence
  Antisense Oligo
guagccggauaaggaggaa

SEQ ID NO: 58445 - RNA, 19 nt, Artificial Sequence
  Sense Oligo
uccuccuuauccggcuacu

SEQ ID NO: 58446 - RNA, 19 nt, Artificial Sequence
  Antisense Oligo
aguagccggauaaggagga

SEQ ID NO: 58447 - RNA, 19 nt, Artificial Sequence
  Sense Oligo
ccuccuuauccggcuacuc

SEQ ID NO: 58448 - RNA, 19 nt, Artificial Sequence
  Antisense Oligo
gaguagccggauaaggagg

SEQ ID NO: 58449 - RNA, 19 nt, Artificial Sequence
  Sense Oligo
cuccuuauccggcuacuca

SEQ ID NO: 58450 - RNA, 19 nt, Artificial Sequence
  Antisense Oligo
ugaguagccggauaaggag

SEQ ID NO: 58451 - RNA, 19 nt, Artificial Sequence
  Sense Oligo
uccuuauccggcuacucac

SEQ ID NO: 58452 - RNA, 19 nt, Artificial Sequence
  Antisense Oligo
gugaguagccggauaagga

SEQ ID NO: 58453 - RNA, 19 nt, Artificial Sequence
  Sense Oligo
ccuuauccggcuacucacu

SEQ ID NO: 58454 - RNA, 19 nt, Artificial Sequence
  Antisense Oligo
agugaguagccggauaagg

SEQ ID NO: 58455 - RNA, 19 nt, Artificial Sequence
  Sense Oligo
cuuauccggcuacucacuc

SEQ ID NO: 58456 - RNA, 19 nt, Artificial Sequence
  Antisense Oligo
gagugaguagccggauaag

SEQ ID NO: 58457 - RNA, 19 nt, Artificial Sequence
  Sense Oligo
uccggcuacucacucacuu

SEQ ID NO: 58458 - RNA, 19 nt, Artificial Sequence
  Antisense Oligo
aagugagugaguagccgga

SEQ ID NO: 58459 - RNA, 19 nt, Artificial Sequence
  Sense Oligo
ccggcuacucacucacuug

SEQ ID NO: 58460 - RNA, 19 nt, Artificial Sequence
  Antisense Oligo
caagugagugaguagccgg

SEQ ID NO: 58461 - RNA, 19 nt, Artificial Sequence
  Sense Oligo
cggcuacucacucacuugg

SEQ ID NO: 58462 - RNA, 19 nt, Artificial Sequence
  Antisense Oligo
ccaagugagugaguagccg

SEQ ID NO: 58463 - RNA, 19 nt, Artificial Sequence
  Sense Oligo
cagaguucccagguauaac

SEQ ID NO: 58464 - RNA, 19 nt, Artificial Sequence
  Antisense Oligo
guuauaccugggaacucug

SEQ ID NO: 58465 - RNA, 19 nt, Artificial Sequence
  Sense Oligo
agaguucccagguauaacc

SEQ ID NO: 58466 - RNA, 19 nt, Artificial Sequence
  Antisense Oligo
gguuauaccugggaacucu

SEQ ID NO: 58467 - RNA, 19 nt, Artificial Sequence
  Sense Oligo
gaguucccagguauaaccc

SEQ ID NO: 58468 - RNA, 19 nt, Artificial Sequence
  Antisense Oligo
ggguuauaccugggaacuc

SEQ ID NO: 58469 - RNA, 19 nt, Artificial Sequence
  Sense Oligo
aguucccagguauaaccca

SEQ ID NO: 58470 - RNA, 19 nt, Artificial Sequence
  Antisense Oligo
uggguuauaccugggaacu

SEQ ID NO: 58471 - RNA, 19 nt, Artificial Sequence
  Sense Oligo
guucccagguauaacccag

SEQ ID NO: 58472 - RNA, 19 nt, Artificial Sequence
  Antisense Oligo
cuggguuauaccugggaac

SEQ ID NO: 58473 - RNA, 19 nt, Artificial Sequence
  Sense Oligo
uucccagguauaacccagu

SEQ ID NO: 58474 - RNA, 19 nt, Artificial Sequence
  Antisense Oligo
acuggguuauaccugggaa

SEQ ID NO: 58475 - RNA, 19 nt, Artificial Sequence
  Sense Oligo
ucccagguauaacccagug

SEQ ID NO: 58476 - RNA, 19 nt, Artificial Sequence
  Antisense Oligo
cacuggguuauaccuggga

SEQ ID NO: 58477 - RNA, 19 nt, Artificial Sequence
  Sense Oligo
cccagguauaacccagugc

SEQ ID NO: 58478 - RNA, 19 nt, Artificial Sequence
  Antisense Oligo
gcacuggguuauaccuggg

SEQ ID NO: 58479 - RNA, 19 nt, Artificial Sequence
  Sense Oligo
ccagguauaacccagugcu

SEQ ID NO: 58480 - RNA, 19 nt, Artificial Sequence
  Antisense Oligo
agcacuggguuauaccugg

SEQ ID NO: 58481 - RNA, 19 nt, Artificial Sequence
  Sense Oligo
caaugggcucaguuaagaa

SEQ ID NO: 58482 - RNA, 19 nt, Artificial Sequence
  Antisense Oligo
uucuuaacugagcccauug

SEQ ID NO: 58483 - RNA, 19 nt, Artificial Sequence
  Sense Oligo
aaccugcuuucgcuucuuc

SEQ ID NO: 58484 - RNA, 19 nt, Artificial Sequence
  Antisense Oligo
gaagaagcgaaagcagguu

SEQ ID NO: 58485 - RNA, 19 nt, Artificial Sequence
  Sense Oligo
uuucgcuucuucccaggga

SEQ ID NO: 58486 - RNA, 19 nt, Artificial Sequence
  Antisense Oligo
ucccugggaagaagcgaaa

SEQ ID NO: 58487 - RNA, 19 nt, Artificial Sequence
  Sense Oligo
gcuucuucccagggagucc

SEQ ID NO: 58488 - RNA, 19 nt, Artificial Sequence
  Antisense Oligo
ggacucccugggaagaagc

SEQ ID NO: 58489 - RNA, 19 nt, Artificial Sequence
  Sense Oligo
ucuucccagggaguccuuu

SEQ ID NO: 58490 - RNA, 19 nt, Artificial Sequence
  Antisense Oligo
aaaggacucccugggaaga

SEQ ID NO: 58491 - RNA, 19 nt, Artificial Sequence
  Sense Oligo
cuucccagggaguccuuuu

SEQ ID NO: 58492 - RNA, 19 nt, Artificial Sequence
  Antisense Oligo
aaaaggacucccugggaag

SEQ ID NO: 58493 - RNA, 19 nt, Artificial Sequence
  Sense Oligo
uucccagggaguccuuuug

SEQ ID NO: 58494 - RNA, 19 nt, Artificial Sequence
  Antisense Oligo
caaaaggacucccugggaa

SEQ ID NO: 58495 - RNA, 19 nt, Artificial Sequence
  Sense Oligo
ucccagggaguccuuuugu

SEQ ID NO: 58496 - RNA, 19 nt, Artificial Sequence
  Antisense Oligo
acaaaaggacucccuggga

SEQ ID NO: 58497 - RNA, 19 nt, Artificial Sequence
  Sense Oligo
cccagggaguccuuuuguc

SEQ ID NO: 58498 - RNA, 19 nt, Artificial Sequence
  Antisense Oligo
gacaaaaggacucccuggg

SEQ ID NO: 58499 - RNA, 19 nt, Artificial Sequence
  Sense Oligo
ccagggaguccuuuugucu

SEQ ID NO: 58500 - RNA, 19 nt, Artificial Sequence
  Antisense Oligo
agacaaaaggacucccugg

SEQ ID NO: 58501 - RNA, 19 nt, Artificial Sequence
  Sense Oligo
agggaguccuuuugucuug

SEQ ID NO: 58502 - RNA, 19 nt, Artificial Sequence
  Antisense Oligo
caagacaaaaggacucccu

SEQ ID NO: 58503 - RNA, 19 nt, Artificial Sequence
  Sense Oligo
gggaguccuuuugucuuga

SEQ ID NO: 58504 - RNA, 19 nt, Artificial Sequence
  Antisense Oligo
ucaagacaaaaggacuccc

SEQ ID NO: 58505 - RNA, 19 nt, Artificial Sequence
  Sense Oligo
ggaguccuuuugucuugag

SEQ ID NO: 58506 - RNA, 19 nt, Artificial Sequence
  Antisense Oligo
cucaagacaaaaggacucc

SEQ ID NO: 58507 - RNA, 19 nt, Artificial Sequence
  Sense Oligo
gaguccuuuugucuugagu

SEQ ID NO: 58508 - RNA, 19 nt, Artificial Sequence
  Antisense Oligo
acucaagacaaaaggacuc

SEQ ID NO: 58509 - RNA, 19 nt, Artificial Sequence
  Sense Oligo
aguccuuuugucuugaguc

SEQ ID NO: 58510 - RNA, 19 nt, Artificial Sequence
  Antisense Oligo
gacucaagacaaaaggacu

SEQ ID NO: 58511 - RNA, 19 nt, Artificial Sequence
  Sense Oligo
guccuuuugucuugagucc

SEQ ID NO: 58512 - RNA, 19 nt, Artificial Sequence
  Antisense Oligo
ggacucaagacaaaaggac

SEQ ID NO: 58513 - RNA, 19 nt, Artificial Sequence
  Sense Oligo
uccuuuugucuugaguccu

SEQ ID NO: 58514 - RNA, 19 nt, Artificial Sequence
  Antisense Oligo
aggacucaagacaaaagga

SEQ ID NO: 58515 - RNA, 19 nt, Artificial Sequence
  Sense Oligo
ccuuuugucuugaguccua

SEQ ID NO: 58516 - RNA, 19 nt, Artificial Sequence
  Antisense Oligo
uaggacucaagacaaaagg

SEQ ID NO: 58517 - RNA, 19 nt, Artificial Sequence
  Sense Oligo
cuuuugucuugaguccuag

SEQ ID NO: 58518 - RNA, 19 nt, Artificial Sequence
  Antisense Oligo
cuaggacucaagacaaaag

SEQ ID NO: 58519 - RNA, 19 nt, Artificial Sequence
  Sense Oligo
uuuugucuugaguccuagc

SEQ ID NO: 58520 - RNA, 19 nt, Artificial Sequence
  Antisense Oligo
gcuaggacucaagacaaaa

SEQ ID NO: 58521 - RNA, 19 nt, Artificial Sequence
  Sense Oligo
uuugucuugaguccuagcu

SEQ ID NO: 58522 - RNA, 19 nt, Artificial Sequence
  Antisense Oligo
agcuaggacucaagacaaa

SEQ ID NO: 58523 - RNA, 19 nt, Artificial Sequence
  Sense Oligo
uugucuugaguccuagcug

SEQ ID NO: 58524 - RNA, 19 nt, Artificial Sequence
  Antisense Oligo
cagcuaggacucaagacaa

SEQ ID NO: 58525 - RNA, 19 nt, Artificial Sequence
  Sense Oligo
ugucuugaguccuagcugc

SEQ ID NO: 58526 - RNA, 19 nt, Artificial Sequence
  Antisense Oligo
gcagcuaggacucaagaca

SEQ ID NO: 58527 - RNA, 19 nt, Artificial Sequence
  Sense Oligo
gucuugaguccuagcugcc

SEQ ID NO: 58528 - RNA, 19 nt, Artificial Sequence
  Antisense Oligo
ggcagcuaggacucaagac

SEQ ID NO: 58529 - RNA, 19 nt, Artificial Sequence
  Sense Oligo
ucuugaguccuagcugcca

SEQ ID NO: 58530 - RNA, 19 nt, Artificial Sequence
  Antisense Oligo
uggcagcuaggacucaaga

SEQ ID NO: 58531 - RNA, 19 nt, Artificial Sequence
  Sense Oligo
gaguccuagcugccaucua

SEQ ID NO: 58532 - RNA, 19 nt, Artificial Sequence
  Antisense Oligo
uagauggcagcuaggacuc

SEQ ID NO: 58533 - RNA, 19 nt, Artificial Sequence
  Sense Oligo
aguccuagcugccaucuau

SEQ ID NO: 58534 - RNA, 19 nt, Artificial Sequence
  Antisense Oligo
auagauggcagcuaggacu

SEQ ID NO: 58535 - RNA, 19 nt, Artificial Sequence
  Sense Oligo
guccuagcugccaucuaug

SEQ ID NO: 58536 - RNA, 19 nt, Artificial Sequence
  Antisense Oligo
cauagauggcagcuaggac

SEQ ID NO: 58537 - RNA, 19 nt, Artificial Sequence
  Sense Oligo
uccuagcugccaucuaugc

SEQ ID NO: 58538 - RNA, 19 nt, Artificial Sequence
  Antisense Oligo
gcauagauggcagcuagga

SEQ ID NO: 58539 - RNA, 19 nt, Artificial Sequence
  Sense Oligo
ccuagcugccaucuaugcg

SEQ ID NO: 58540 - RNA, 19 nt, Artificial Sequence
  Antisense Oligo
cgcauagauggcagcuagg

SEQ ID NO: 58541 - RNA, 19 nt, Artificial Sequence
  Sense Oligo
cuagcugccaucuaugcgu

SEQ ID NO: 58542 - RNA, 19 nt, Artificial Sequence
  Antisense Oligo
acgcauagauggcagcuag

SEQ ID NO: 58543 - RNA, 19 nt, Artificial Sequence
  Sense Oligo
uagcugccaucuaugcguu

SEQ ID NO: 58544 - RNA, 19 nt, Artificial Sequence
  Antisense Oligo
aacgcauagauggcagcua

SEQ ID NO: 58545 - RNA, 19 nt, Artificial Sequence
  Sense Oligo
agcugccaucuaugcguuu

SEQ ID NO: 58546 - RNA, 19 nt, Artificial Sequence
  Antisense Oligo
aaacgcauagauggcagcu

SEQ ID NO: 58547 - RNA, 19 nt, Artificial Sequence
  Sense Oligo
gcugccaucuaugcguuuu

SEQ ID NO: 58548 - RNA, 19 nt, Artificial Sequence
  Antisense Oligo
aaaacgcauagauggcagc

SEQ ID NO: 58549 - RNA, 19 nt, Artificial Sequence
  Sense Oligo
cugccaucuaugcguuuug

SEQ ID NO: 58550 - RNA, 19 nt, Artificial Sequence
  Antisense Oligo
caaaacgcauagauggcag

SEQ ID NO: 58551 - RNA, 19 nt, Artificial Sequence
  Sense Oligo
ugccaucuaugcguuuugg

SEQ ID NO: 58552 - RNA, 19 nt, Artificial Sequence
  Antisense Oligo
ccaaaacgcauagauggca

SEQ ID NO: 58553 - RNA, 19 nt, Artificial Sequence
  Sense Oligo
gccaucuaugcguuuugga

SEQ ID NO: 58554 - RNA, 19 nt, Artificial Sequence
  Antisense Oligo
uccaaaacgcauagauggc

SEQ ID NO: 58555 - RNA, 19 nt, Artificial Sequence
  Sense Oligo
ccaucuaugcguuuuggag

SEQ ID NO: 58556 - RNA, 19 nt, Artificial Sequence
  Antisense Oligo
cuccaaaacgcauagaugg

SEQ ID NO: 58557 - RNA, 19 nt, Artificial Sequence
  Sense Oligo
cccuguggcguaugauggu

SEQ ID NO: 58558 - RNA, 19 nt, Artificial Sequence
  Antisense Oligo
accaucauacgccacaggg

SEQ ID NO: 58559 - RNA, 19 nt, Artificial Sequence
  Sense Oligo
ccuguggcguaugauggua

SEQ ID NO: 58560 - RNA, 19 nt, Artificial Sequence
  Antisense Oligo
uaccaucauacgccacagg

SEQ ID NO: 58561 - RNA, 19 nt, Artificial Sequence
  Sense Oligo
cuguggcguaugaugguau

SEQ ID NO: 58562 - RNA, 19 nt, Artificial Sequence
  Antisense Oligo
auaccaucauacgccacag

SEQ ID NO: 58563 - RNA, 19 nt, Artificial Sequence
  Sense Oligo
uguggcguaugaugguaug

SEQ ID NO: 58564 - RNA, 19 nt, Artificial Sequence
  Antisense Oligo
cauaccaucauacgccaca

SEQ ID NO: 58565 - RNA, 19 nt, Artificial Sequence
  Sense Oligo
guggcguaugaugguaugg

SEQ ID NO: 58566 - RNA, 19 nt, Artificial Sequence
  Antisense Oligo
ccauaccaucauacgccac

SEQ ID NO: 58567 - RNA, 19 nt, Artificial Sequence
  Sense Oligo
uggcguaugaugguauggg

SEQ ID NO: 58568 - RNA, 19 nt, Artificial Sequence
  Antisense Oligo
cccauaccaucauacgcca

SEQ ID NO: 58569 - RNA, 19 nt, Artificial Sequence
  Sense Oligo
auuauacagaauccacuuc

SEQ ID NO: 58570 - RNA, 19 nt, Artificial Sequence
  Antisense Oligo
gaaguggauucuguauaau

SEQ ID NO: 58571 - RNA, 19 nt, Artificial Sequence
  Sense Oligo
auacagaauccacuucaaa

SEQ ID NO: 58572 - RNA, 19 nt, Artificial Sequence
  Antisense Oligo
uuugaaguggauucuguau

SEQ ID NO: 58573 - RNA, 19 nt, Artificial Sequence
  Sense Oligo
cagaauccacuucaaauua

SEQ ID NO: 58574 - RNA, 19 nt, Artificial Sequence
  Antisense Oligo
uaauuugaaguggauucug

SEQ ID NO: 58575 - RNA, 19 nt, Artificial Sequence
  Sense Oligo
gaauccacuucaaauuaac

SEQ ID NO: 58576 - RNA, 19 nt, Artificial Sequence
  Antisense Oligo
guuaauuugaaguggauuc

SEQ ID NO: 58577 - RNA, 19 nt, Artificial Sequence
  Sense Oligo
cacucugugucucuggucc

SEQ ID NO: 58578 - RNA, 19 nt, Artificial Sequence
  Antisense Oligo
ggaccagagacacagagug

SEQ ID NO: 58579 - RNA, 19 nt, Artificial Sequence
  Sense Oligo
acucugugucucuggucca

SEQ ID NO: 58580 - RNA, 19 nt, Artificial Sequence
  Antisense Oligo
uggaccagagacacagagu

SEQ ID NO: 58581 - RNA, 19 nt, Artificial Sequence
  Sense Oligo
ucauuauuuuaccuguguc

SEQ ID NO: 58582 - RNA, 19 nt, Artificial Sequence
  Antisense Oligo
gacacagguaaaauaauga

SEQ ID NO: 58583 - RNA, 19 nt, Artificial Sequence
  Sense Oligo
cauuauuuuaccugugucu

SEQ ID NO: 58584 - RNA, 19 nt, Artificial Sequence
  Antisense Oligo
agacacagguaaaauaaug

SEQ ID NO: 58585 - RNA, 19 nt, Artificial Sequence
  Sense Oligo
uuauuuuaccugugucuuc

SEQ ID NO: 58586 - RNA, 19 nt, Artificial Sequence
  Antisense Oligo
gaagacacagguaaaauaa

SEQ ID NO: 58587 - RNA, 19 nt, Artificial Sequence
  Sense Oligo
uuuaccugugucuucauug

SEQ ID NO: 58588 - RNA, 19 nt, Artificial Sequence
  Antisense Oligo
caaugaagacacagguaaa

SEQ ID NO: 58589 - RNA, 19 nt, Artificial Sequence
  Sense Oligo
uuaccugugucuucauugu

SEQ ID NO: 58590 - RNA, 19 nt, Artificial Sequence
  Antisense Oligo
acaaugaagacacagguaa

SEQ ID NO: 58591 - RNA, 19 nt, Artificial Sequence
  Sense Oligo
accugugucuucauuguag

SEQ ID NO: 58592 - RNA, 19 nt, Artificial Sequence
  Antisense Oligo
cuacaaugaagacacaggu

SEQ ID NO: 58593 - RNA, 19 nt, Artificial Sequence
  Sense Oligo
gugucuucauuguagcuag

SEQ ID NO: 58594 - RNA, 19 nt, Artificial Sequence
  Antisense Oligo
cuagcuacaaugaagacac

SEQ ID NO: 58595 - RNA, 19 nt, Artificial Sequence
  Sense Oligo
ugucuucauuguagcuagg

SEQ ID NO: 58596 - RNA, 19 nt, Artificial Sequence
  Antisense Oligo
ccuagcuacaaugaagaca

SEQ ID NO: 58597 - RNA, 19 nt, Artificial Sequence
  Sense Oligo
gucuucauuguagcuaggg

SEQ ID NO: 58598 - RNA, 19 nt, Artificial Sequence
  Antisense Oligo
cccuagcuacaaugaagac

SEQ ID NO: 58599 - RNA, 19 nt, Artificial Sequence
  Sense Oligo
ucuucauuguagcuaggga

SEQ ID NO: 58600 - RNA, 19 nt, Artificial Sequence
  Antisense Oligo
ucccuagcuacaaugaaga

SEQ ID NO: 58601 - RNA, 19 nt, Artificial Sequence
  Sense Oligo
uucauuguagcuagggaag

SEQ ID NO: 58602 - RNA, 19 nt, Artificial Sequence
  Antisense Oligo
cuucccuagcuacaaugaa

SEQ ID NO: 58603 - RNA, 19 nt, Artificial Sequence
  Sense Oligo
ucauuguagcuagggaaga

SEQ ID NO: 58604 - RNA, 19 nt, Artificial Sequence
  Antisense Oligo
ucuucccuagcuacaauga

SEQ ID NO: 58605 - RNA, 19 nt, Artificial Sequence
  Sense Oligo
cauuguagcuagggaagaa

SEQ ID NO: 58606 - RNA, 19 nt, Artificial Sequence
  Antisense Oligo
uucuucccuagcuacaaug

SEQ ID NO: 58607 - RNA, 19 nt, Artificial Sequence
  Sense Oligo
aaagagcacacugcauaac

SEQ ID NO: 58608 - RNA, 19 nt, Artificial Sequence
  Antisense Oligo
guuaugcagugugcucuuu

SEQ ID NO: 58609 - RNA, 19 nt, Artificial Sequence
  Sense Oligo
aagagcacacugcauaacc

SEQ ID NO: 58610 - RNA, 19 nt, Artificial Sequence
  Antisense Oligo
gguuaugcagugugcucuu

SEQ ID NO: 58611 - RNA, 19 nt, Artificial Sequence
  Sense Oligo
agagcacacugcauaacca

SEQ ID NO: 58612 - RNA, 19 nt, Artificial Sequence
  Antisense Oligo
ugguuaugcagugugcucu

SEQ ID NO: 58613 - RNA, 19 nt, Artificial Sequence
  Sense Oligo
gagcacacugcauaaccaa

SEQ ID NO: 58614 - RNA, 19 nt, Artificial Sequence
  Antisense Oligo
uugguuaugcagugugcuc

SEQ ID NO: 58615 - RNA, 19 nt, Artificial Sequence
  Sense Oligo
agcacacugcauaaccaag

SEQ ID NO: 58616 - RNA, 19 nt, Artificial Sequence
  Antisense Oligo
cuugguuaugcagugugcu

SEQ ID NO: 58617 - RNA, 19 nt, Artificial Sequence
  Sense Oligo
gcacacugcauaaccaaga

SEQ ID NO: 58618 - RNA, 19 nt, Artificial Sequence
  Antisense Oligo
ucuugguuaugcagugugc

SEQ ID NO: 58619 - RNA, 19 nt, Artificial Sequence
  Sense Oligo
cacacugcauaaccaagau

SEQ ID NO: 58620 - RNA, 19 nt, Artificial Sequence
  Antisense Oligo
aucuugguuaugcagugug

SEQ ID NO: 58621 - RNA, 19 nt, Artificial Sequence
  Sense Oligo
acacugcauaaccaagaug

SEQ ID NO: 58622 - RNA, 19 nt, Artificial Sequence
  Antisense Oligo
caucuugguuaugcagugu

SEQ ID NO: 58623 - RNA, 19 nt, Artificial Sequence
  Sense Oligo
cacugcauaaccaagaugg

SEQ ID NO: 58624 - RNA, 19 nt, Artificial Sequence
  Antisense Oligo
ccaucuugguuaugcagug

SEQ ID NO: 58625 - RNA, 19 nt, Artificial Sequence
  Sense Oligo
acugcauaaccaagauggc

SEQ ID NO: 58626 - RNA, 19 nt, Artificial Sequence
  Antisense Oligo
gccaucuugguuaugcagu

SEQ ID NO: 58627 - RNA, 19 nt, Artificial Sequence
  Sense Oligo
cugcauaaccaagauggcc

SEQ ID NO: 58628 - RNA, 19 nt, Artificial Sequence
  Antisense Oligo
ggccaucuugguuaugcag

SEQ ID NO: 58629 - RNA, 19 nt, Artificial Sequence
  Sense Oligo
ugcauaaccaagauggcca

SEQ ID NO: 58630 - RNA, 19 nt, Artificial Sequence
  Antisense Oligo
uggccaucuugguuaugca

SEQ ID NO: 58631 - RNA, 19 nt, Artificial Sequence
  Sense Oligo
gcauaaccaagauggccaa

SEQ ID NO: 58632 - RNA, 19 nt, Artificial Sequence
  Antisense Oligo
uuggccaucuugguuaugc

SEQ ID NO: 58633 - RNA, 19 nt, Artificial Sequence
  Sense Oligo
cauaaccaagauggccaac

SEQ ID NO: 58634 - RNA, 19 nt, Artificial Sequence
  Antisense Oligo
guuggccaucuugguuaug

SEQ ID NO: 58635 - RNA, 19 nt, Artificial Sequence
  Sense Oligo
uucuuuaucucacuguaac

SEQ ID NO: 58636 - RNA, 19 nt, Artificial Sequence
  Antisense Oligo
guuacagugagauaaagaa

SEQ ID NO: 58637 - RNA, 19 nt, Artificial Sequence
  Sense Oligo
ccguuccgcuugcuagccu

SEQ ID NO: 58638 - RNA, 19 nt, Artificial Sequence
  Antisense Oligo
aggcuagcaagcggaacgg

SEQ ID NO: 58639 - RNA, 19 nt, Artificial Sequence
  Sense Oligo
cguuccgcuugcuagccuu

SEQ ID NO: 58640 - RNA, 19 nt, Artificial Sequence
  Antisense Oligo
aaggcuagcaagcggaacg

SEQ ID NO: 58641 - RNA, 19 nt, Artificial Sequence
  Sense Oligo
guuccgcuugcuagccuuc

SEQ ID NO: 58642 - RNA, 19 nt, Artificial Sequence
  Antisense Oligo
gaaggcuagcaagcggaac

SEQ ID NO: 58643 - RNA, 19 nt, Artificial Sequence
  Sense Oligo
uuccgcuugcuagccuucc

SEQ ID NO: 58644 - RNA, 19 nt, Artificial Sequence
  Antisense Oligo
ggaaggcuagcaagcggaa

SEQ ID NO: 58645 - RNA, 19 nt, Artificial Sequence
  Sense Oligo
uccgcuugcuagccuuccu

SEQ ID NO: 58646 - RNA, 19 nt, Artificial Sequence
  Antisense Oligo
aggaaggcuagcaagcgga

SEQ ID NO: 58647 - RNA, 19 nt, Artificial Sequence
  Sense Oligo
ccgcuugcuagccuuccuu

SEQ ID NO: 58648 - RNA, 19 nt, Artificial Sequence
  Antisense Oligo
aaggaaggcuagcaagcgg

SEQ ID NO: 58649 - RNA, 19 nt, Artificial Sequence
  Sense Oligo
cgcuugcuagccuuccuuu

SEQ ID NO: 58650 - RNA, 19 nt, Artificial Sequence
  Antisense Oligo
aaaggaaggcuagcaagcg

SEQ ID NO: 58651 - RNA, 19 nt, Artificial Sequence
  Sense Oligo
gcuagccuuccuuucaccu

SEQ ID NO: 58652 - RNA, 19 nt, Artificial Sequence
  Antisense Oligo
aggugaaaggaaggcuagc

SEQ ID NO: 58653 - RNA, 19 nt, Artificial Sequence
  Sense Oligo
uccuuucaccuggaucacu

SEQ ID NO: 58654 - RNA, 19 nt, Artificial Sequence
  Antisense Oligo
agugauccaggugaaagga

SEQ ID NO: 58655 - RNA, 19 nt, Artificial Sequence
  Sense Oligo
cgccguuuucaucuuagaa

SEQ ID NO: 58656 - RNA, 19 nt, Artificial Sequence
  Antisense Oligo
uucuaagaugaaaacggcg

SEQ ID NO: 58657 - RNA, 19 nt, Artificial Sequence
  Sense Oligo
aaccgccuuccgacucuau

SEQ ID NO: 58658 - RNA, 19 nt, Artificial Sequence
  Antisense Oligo
auagagucggaaggcgguu

SEQ ID NO: 58659 - RNA, 19 nt, Artificial Sequence
  Sense Oligo
accgccuuccgacucuaug

SEQ ID NO: 58660 - RNA, 19 nt, Artificial Sequence
  Antisense Oligo
cauagagucggaaggcggu

SEQ ID NO: 58661 - RNA, 19 nt, Artificial Sequence
  Sense Oligo
ccgccuuccgacucuaugc

SEQ ID NO: 58662 - RNA, 19 nt, Artificial Sequence
  Antisense Oligo
gcauagagucggaaggcgg

SEQ ID NO: 58663 - RNA, 19 nt, Artificial Sequence
  Sense Oligo
cgccuuccgacucuaugcu

SEQ ID NO: 58664 - RNA, 19 nt, Artificial Sequence
  Antisense Oligo
agcauagagucggaaggcg

SEQ ID NO: 58665 - RNA, 19 nt, Artificial Sequence
  Sense Oligo
gccuuccgacucuaugcug

SEQ ID NO: 58666 - RNA, 19 nt, Artificial Sequence
  Antisense Oligo
cagcauagagucggaaggc

SEQ ID NO: 58667 - RNA, 19 nt, Artificial Sequence
  Sense Oligo
cucuaugcuggugcuccac

SEQ ID NO: 58668 - RNA, 19 nt, Artificial Sequence
  Antisense Oligo
guggagcaccagcauagag

SEQ ID NO: 58669 - RNA, 19 nt, Artificial Sequence
  Sense Oligo
ucuaugcuggugcuccacu

SEQ ID NO: 58670 - RNA, 19 nt, Artificial Sequence
  Antisense Oligo
aguggagcaccagcauaga

SEQ ID NO: 58671 - RNA, 19 nt, Artificial Sequence
  Sense Oligo
cuaugcuggugcuccacuc

SEQ ID NO: 58672 - RNA, 19 nt, Artificial Sequence
  Antisense Oligo
gaguggagcaccagcauag

SEQ ID NO: 58673 - RNA, 19 nt, Artificial Sequence
  Sense Oligo
uggugcuccacucccaaug

SEQ ID NO: 58674 - RNA, 19 nt, Artificial Sequence
  Antisense Oligo
cauugggaguggagcacca

SEQ ID NO: 58675 - RNA, 19 nt, Artificial Sequence
  Sense Oligo
ggugcuccacucccaaugg

SEQ ID NO: 58676 - RNA, 19 nt, Artificial Sequence
  Antisense Oligo
ccauugggaguggagcacc

SEQ ID NO: 58677 - RNA, 19 nt, Artificial Sequence
  Sense Oligo
gugcuccacucccaauggc

SEQ ID NO: 58678 - RNA, 19 nt, Artificial Sequence
  Antisense Oligo
gccauugggaguggagcac

SEQ ID NO: 58679 - RNA, 19 nt, Artificial Sequence
  Sense Oligo
ugcuccacucccaauggcc

SEQ ID NO: 58680 - RNA, 19 nt, Artificial Sequence
  Antisense Oligo
ggccauugggaguggagca

SEQ ID NO: 58681 - RNA, 19 nt, Artificial Sequence
  Sense Oligo
gcuccacucccaauggccu

SEQ ID NO: 58682 - RNA, 19 nt, Artificial Sequence
  Antisense Oligo
aggccauugggaguggagc

SEQ ID NO: 58683 - RNA, 19 nt, Artificial Sequence
  Sense Oligo
cuccacucccaauggccuc

SEQ ID NO: 58684 - RNA, 19 nt, Artificial Sequence
  Antisense Oligo
gaggccauugggaguggag

SEQ ID NO: 58685 - RNA, 19 nt, Artificial Sequence
  Sense Oligo
uccacucccaauggccucu

SEQ ID NO: 58686 - RNA, 19 nt, Artificial Sequence
  Antisense Oligo
agaggccauugggagugga

SEQ ID NO: 58687 - RNA, 19 nt, Artificial Sequence
  Sense Oligo
cccaauggccucuaccagg

SEQ ID NO: 58688 - RNA, 19 nt, Artificial Sequence
  Antisense Oligo
ccugguagaggccauuggg

SEQ ID NO: 58689 - RNA, 19 nt, Artificial Sequence
  Sense Oligo
ccucuaccaggcucaccau

SEQ ID NO: 58690 - RNA, 19 nt, Artificial Sequence
  Antisense Oligo
auggugagccugguagagg

SEQ ID NO: 58691 - RNA, 19 nt, Artificial Sequence
  Sense Oligo
cucuaccaggcucaccauc

SEQ ID NO: 58692 - RNA, 19 nt, Artificial Sequence
  Antisense Oligo
gauggugagccugguagag

SEQ ID NO: 58693 - RNA, 19 nt, Artificial Sequence
  Sense Oligo
ucuaccaggcucaccaucu

SEQ ID NO: 58694 - RNA, 19 nt, Artificial Sequence
  Antisense Oligo
agauggugagccugguaga

SEQ ID NO: 58695 - RNA, 19 nt, Artificial Sequence
  Sense Oligo
cuaccaggcucaccaucuu

SEQ ID NO: 58696 - RNA, 19 nt, Artificial Sequence
  Antisense Oligo
aagauggugagccugguag

SEQ ID NO: 58697 - RNA, 19 nt, Artificial Sequence
  Sense Oligo
uaccaggcucaccaucuuc

SEQ ID NO: 58698 - RNA, 19 nt, Artificial Sequence
  Antisense Oligo
gaagauggugagccuggua

SEQ ID NO: 58699 - RNA, 19 nt, Artificial Sequence
  Sense Oligo
accaggcucaccaucuucu

SEQ ID NO: 58700 - RNA, 19 nt, Artificial Sequence
  Antisense Oligo
agaagauggugagccuggu

SEQ ID NO: 58701 - RNA, 19 nt, Artificial Sequence
  Sense Oligo
ccaggcucaccaucuucuc

SEQ ID NO: 58702 - RNA, 19 nt, Artificial Sequence
  Antisense Oligo
gagaagauggugagccugg

SEQ ID NO: 58703 - RNA, 19 nt, Artificial Sequence
  Sense Oligo
caggcucaccaucuucucu

SEQ ID NO: 58704 - RNA, 19 nt, Artificial Sequence
  Antisense Oligo
agagaagauggugagccug

SEQ ID NO: 58705 - RNA, 19 nt, Artificial Sequence
  Sense Oligo
aggcucaccaucuucucua

SEQ ID NO: 58706 - RNA, 19 nt, Artificial Sequence
  Antisense Oligo
uagagaagauggugagccu

SEQ ID NO: 58707 - RNA, 19 nt, Artificial Sequence
  Sense Oligo
ggcucaccaucuucucuac

SEQ ID NO: 58708 - RNA, 19 nt, Artificial Sequence
  Antisense Oligo
guagagaagauggugagcc

SEQ ID NO: 58709 - RNA, 19 nt, Artificial Sequence
  Sense Oligo
gcucaccaucuucucuaca

SEQ ID NO: 58710 - RNA, 19 nt, Artificial Sequence
  Antisense Oligo
uguagagaagauggugagc

SEQ ID NO: 58711 - RNA, 19 nt, Artificial Sequence
  Sense Oligo
acacucuguuccguugccc

SEQ ID NO: 58712 - RNA, 19 nt, Artificial Sequence
  Antisense Oligo
gggcaacggaacagagugu

SEQ ID NO: 58713 - RNA, 19 nt, Artificial Sequence
  Sense Oligo
caucauuaagccuccagug

SEQ ID NO: 58714 - RNA, 19 nt, Artificial Sequence
  Antisense Oligo
cacuggaggcuuaaugaug

SEQ ID NO: 58715 - RNA, 19 nt, Artificial Sequence
  Sense Oligo
cuccagugagggauccaaa

SEQ ID NO: 58716 - RNA, 19 nt, Artificial Sequence
  Antisense Oligo
uuuggaucccucacuggag

SEQ ID NO: 58717 - RNA, 19 nt, Artificial Sequence
  Sense Oligo
uccagugagggauccaaaa

SEQ ID NO: 58718 - RNA, 19 nt, Artificial Sequence
  Antisense Oligo
uuuuggaucccucacugga

SEQ ID NO: 58719 - RNA, 19 nt, Artificial Sequence
  Sense Oligo
ccagugagggauccaaaag

SEQ ID NO: 58720 - RNA, 19 nt, Artificial Sequence
  Antisense Oligo
cuuuuggaucccucacugg

SEQ ID NO: 58721 - RNA, 19 nt, Artificial Sequence
  Sense Oligo
cagugagggauccaaaagg

SEQ ID NO: 58722 - RNA, 19 nt, Artificial Sequence
  Antisense Oligo
ccuuuuggaucccucacug

SEQ ID NO: 58723 - RNA, 19 nt, Artificial Sequence
  Sense Oligo
agugagggauccaaaaggc

SEQ ID NO: 58724 - RNA, 19 nt, Artificial Sequence
  Antisense Oligo
gccuuuuggaucccucacu

SEQ ID NO: 58725 - RNA, 19 nt, Artificial Sequence
  Sense Oligo
gugagggauccaaaaggcu

SEQ ID NO: 58726 - RNA, 19 nt, Artificial Sequence
  Antisense Oligo
agccuuuuggaucccucac

SEQ ID NO: 58727 - RNA, 19 nt, Artificial Sequence
  Sense Oligo
ugagggauccaaaaggcuu

SEQ ID NO: 58728 - RNA, 19 nt, Artificial Sequence
  Antisense Oligo
aagccuuuuggaucccuca

SEQ ID NO: 58729 - RNA, 19 nt, Artificial Sequence
  Sense Oligo
gagggauccaaaaggcuuu

SEQ ID NO: 58730 - RNA, 19 nt, Artificial Sequence
  Antisense Oligo
aaagccuuuuggaucccuc

SEQ ID NO: 58731 - RNA, 19 nt, Artificial Sequence
  Sense Oligo
agggauccaaaaggcuuuc

SEQ ID NO: 58732 - RNA, 19 nt, Artificial Sequence
  Antisense Oligo
gaaagccuuuuggaucccu

SEQ ID NO: 58733 - RNA, 19 nt, Artificial Sequence
  Sense Oligo
gggauccaaaaggcuuucu

SEQ ID NO: 58734 - RNA, 19 nt, Artificial Sequence
  Antisense Oligo
agaaagccuuuuggauccc

SEQ ID NO: 58735 - RNA, 19 nt, Artificial Sequence
  Sense Oligo
ggauccaaaaggcuuucug

SEQ ID NO: 58736 - RNA, 19 nt, Artificial Sequence
  Antisense Oligo
cagaaagccuuuuggaucc

SEQ ID NO: 58737 - RNA, 19 nt, Artificial Sequence
  Sense Oligo
gauccaaaaggcuuucugc

SEQ ID NO: 58738 - RNA, 19 nt, Artificial Sequence
  Antisense Oligo
gcagaaagccuuuuggauc

SEQ ID NO: 58739 - RNA, 19 nt, Artificial Sequence
  Sense Oligo
auccaaaaggcuuucugca

SEQ ID NO: 58740 - RNA, 19 nt, Artificial Sequence
  Antisense Oligo
ugcagaaagccuuuuggau

SEQ ID NO: 58741 - RNA, 19 nt, Artificial Sequence
  Sense Oligo
aggcuuucugcagcagcac

SEQ ID NO: 58742 - RNA, 19 nt, Artificial Sequence
  Antisense Oligo
gugcugcugcagaaagccu

SEQ ID NO: 58743 - RNA, 19 nt, Artificial Sequence
  Sense Oligo
uucugcagcagcacauccu

SEQ ID NO: 58744 - RNA, 19 nt, Artificial Sequence
  Antisense Oligo
aggaugugcugcugcagaa

SEQ ID NO: 58745 - RNA, 19 nt, Artificial Sequence
  Sense Oligo
gaccuggagcaguuggcca

SEQ ID NO: 58746 - RNA, 19 nt, Artificial Sequence
  Antisense Oligo
uggccaacugcuccagguc

SEQ ID NO: 58747 - RNA, 19 nt, Artificial Sequence
  Sense Oligo
accuggagcaguuggccaa

SEQ ID NO: 58748 - RNA, 19 nt, Artificial Sequence
  Antisense Oligo
uuggccaacugcuccaggu

SEQ ID NO: 58749 - RNA, 19 nt, Artificial Sequence
  Sense Oligo
ccuggagcaguuggccaag

SEQ ID NO: 58750 - RNA, 19 nt, Artificial Sequence
  Antisense Oligo
cuuggccaacugcuccagg

SEQ ID NO: 58751 - RNA, 19 nt, Artificial Sequence
  Sense Oligo
cuggagcaguuggccaaga

SEQ ID NO: 58752 - RNA, 19 nt, Artificial Sequence
  Antisense Oligo
ucuuggccaacugcuccag

SEQ ID NO: 58753 - RNA, 19 nt, Artificial Sequence
  Sense Oligo
uggagcaguuggccaagau

SEQ ID NO: 58754 - RNA, 19 nt, Artificial Sequence
  Antisense Oligo
aucuuggccaacugcucca

SEQ ID NO: 58755 - RNA, 19 nt, Artificial Sequence
  Sense Oligo
gagcaguuggccaagaugc

SEQ ID NO: 58756 - RNA, 19 nt, Artificial Sequence
  Antisense Oligo
gcaucuuggccaacugcuc

SEQ ID NO: 58757 - RNA, 19 nt, Artificial Sequence
  Sense Oligo
gcaguuggccaagaugcug

SEQ ID NO: 58758 - RNA, 19 nt, Artificial Sequence
  Antisense Oligo
cagcaucuuggccaacugc

SEQ ID NO: 58759 - RNA, 19 nt, Artificial Sequence
  Sense Oligo
uuggccaagaugcugggac

SEQ ID NO: 58760 - RNA, 19 nt, Artificial Sequence
  Antisense Oligo
gucccagcaucuuggccaa

SEQ ID NO: 58761 - RNA, 19 nt, Artificial Sequence
  Sense Oligo
uggccaagaugcugggaca

SEQ ID NO: 58762 - RNA, 19 nt, Artificial Sequence
  Antisense Oligo
ugucccagcaucuuggcca

SEQ ID NO: 58763 - RNA, 19 nt, Artificial Sequence
  Sense Oligo
cagcaccagcucucuagca

SEQ ID NO: 58764 - RNA, 19 nt, Artificial Sequence
  Antisense Oligo
ugcuagagagcuggugcug

SEQ ID NO: 58765 - RNA, 19 nt, Artificial Sequence
  Sense Oligo
agcaccagcucucuagcag

SEQ ID NO: 58766 - RNA, 19 nt, Artificial Sequence
  Antisense Oligo
cugcuagagagcuggugcu

SEQ ID NO: 58767 - RNA, 19 nt, Artificial Sequence
  Sense Oligo
cagcucucuagcagaagug

SEQ ID NO: 58768 - RNA, 19 nt, Artificial Sequence
  Antisense Oligo
cacuucugcuagagagcug

SEQ ID NO: 58769 - RNA, 19 nt, Artificial Sequence
  Sense Oligo
agcucucuagcagaaguga

SEQ ID NO: 58770 - RNA, 19 nt, Artificial Sequence
  Antisense Oligo
ucacuucugcuagagagcu

SEQ ID NO: 58771 - RNA, 19 nt, Artificial Sequence
  Sense Oligo
gcucucuagcagaagugag

SEQ ID NO: 58772 - RNA, 19 nt, Artificial Sequence
  Antisense Oligo
cucacuucugcuagagagc

SEQ ID NO: 58773 - RNA, 19 nt, Artificial Sequence
  Sense Oligo
cucucuagcagaagugagg

SEQ ID NO: 58774 - RNA, 19 nt, Artificial Sequence
  Antisense Oligo
ccucacuucugcuagagag

SEQ ID NO: 58775 - RNA, 19 nt, Artificial Sequence
  Sense Oligo
gcaagcaggcucgcugucu

SEQ ID NO: 58776 - RNA, 19 nt, Artificial Sequence
  Antisense Oligo
agacagcgagccugcuugc

SEQ ID NO: 58777 - RNA, 19 nt, Artificial Sequence
  Sense Oligo
caagcaggcucgcugucuu

SEQ ID NO: 58778 - RNA, 19 nt, Artificial Sequence
  Antisense Oligo
aagacagcgagccugcuug

SEQ ID NO: 58779 - RNA, 19 nt, Artificial Sequence
  Sense Oligo
aagcaggcucgcugucuug

SEQ ID NO: 58780 - RNA, 19 nt, Artificial Sequence
  Antisense Oligo
caagacagcgagccugcuu

SEQ ID NO: 58781 - RNA, 19 nt, Artificial Sequence
  Sense Oligo
agcaggcucgcugucuugu

SEQ ID NO: 58782 - RNA, 19 nt, Artificial Sequence
  Antisense Oligo
acaagacagcgagccugcu

SEQ ID NO: 58783 - RNA, 19 nt, Artificial Sequence
  Sense Oligo
gcaggcucgcugucuugug

SEQ ID NO: 58784 - RNA, 19 nt, Artificial Sequence
  Antisense Oligo
cacaagacagcgagccugc

SEQ ID NO: 58785 - RNA, 19 nt, Artificial Sequence
  Sense Oligo
caggcucgcugucuugugg

SEQ ID NO: 58786 - RNA, 19 nt, Artificial Sequence
  Antisense Oligo
ccacaagacagcgagccug

SEQ ID NO: 58787 - RNA, 19 nt, Artificial Sequence
  Sense Oligo
aggcucgcugucuuguggg

SEQ ID NO: 58788 - RNA, 19 nt, Artificial Sequence
  Antisense Oligo
cccacaagacagcgagccu

SEQ ID NO: 58789 - RNA, 19 nt, Artificial Sequence
  Sense Oligo
acagccagucugagcucug

SEQ ID NO: 58790 - RNA, 19 nt, Artificial Sequence
  Antisense Oligo
cagagcucagacuggcugu

SEQ ID NO: 58791 - RNA, 19 nt, Artificial Sequence
  Sense Oligo
agccagucugagcucuguc

SEQ ID NO: 58792 - RNA, 19 nt, Artificial Sequence
  Antisense Oligo
gacagagcucagacuggcu

SEQ ID NO: 58793 - RNA, 19 nt, Artificial Sequence
  Sense Oligo
gccagucugagcucugucu

SEQ ID NO: 58794 - RNA, 19 nt, Artificial Sequence
  Antisense Oligo
agacagagcucagacuggc

SEQ ID NO: 58795 - RNA, 19 nt, Artificial Sequence
  Sense Oligo
cagucugagcucugucugu

SEQ ID NO: 58796 - RNA, 19 nt, Artificial Sequence
  Antisense Oligo
acagacagagcucagacug

SEQ ID NO: 58797 - RNA, 19 nt, Artificial Sequence
  Sense Oligo
agucugagcucugucugug

SEQ ID NO: 58798 - RNA, 19 nt, Artificial Sequence
  Antisense Oligo
cacagacagagcucagacu

SEQ ID NO: 58799 - RNA, 19 nt, Artificial Sequence
  Sense Oligo
gucugagcucugucugugc

SEQ ID NO: 58800 - RNA, 19 nt, Artificial Sequence
  Antisense Oligo
gcacagacagagcucagac

SEQ ID NO: 58801 - RNA, 19 nt, Artificial Sequence
  Sense Oligo
ucugagcucugucugugcu

SEQ ID NO: 58802 - RNA, 19 nt, Artificial Sequence
  Antisense Oligo
agcacagacagagcucaga

SEQ ID NO: 58803 - RNA, 19 nt, Artificial Sequence
  Sense Oligo
agcucugucugugcuguug

SEQ ID NO: 58804 - RNA, 19 nt, Artificial Sequence
  Antisense Oligo
caacagcacagacagagcu

SEQ ID NO: 58805 - RNA, 19 nt, Artificial Sequence
  Sense Oligo
gcucugucugugcuguugc

SEQ ID NO: 58806 - RNA, 19 nt, Artificial Sequence
  Antisense Oligo
gcaacagcacagacagagc

SEQ ID NO: 58807 - RNA, 19 nt, Artificial Sequence
  Sense Oligo
ucugucugugcuguugcug

SEQ ID NO: 58808 - RNA, 19 nt, Artificial Sequence
  Antisense Oligo
cagcaacagcacagacaga

SEQ ID NO: 58809 - RNA, 19 nt, Artificial Sequence
  Sense Oligo
aaccgugucuagggaaggc

SEQ ID NO: 58810 - RNA, 19 nt, Artificial Sequence
  Antisense Oligo
gccuucccuagacacgguu

SEQ ID NO: 58811 - RNA, 19 nt, Artificial Sequence
  Sense Oligo
accgugucuagggaaggcg

SEQ ID NO: 58812 - RNA, 19 nt, Artificial Sequence
  Antisense Oligo
cgccuucccuagacacggu

SEQ ID NO: 58813 - RNA, 19 nt, Artificial Sequence
  Sense Oligo
ccgugucuagggaaggcga

SEQ ID NO: 58814 - RNA, 19 nt, Artificial Sequence
  Antisense Oligo
ucgccuucccuagacacgg

SEQ ID NO: 58815 - RNA, 19 nt, Artificial Sequence
  Sense Oligo
cgugucuagggaaggcgau

SEQ ID NO: 58816 - RNA, 19 nt, Artificial Sequence
  Antisense Oligo
aucgccuucccuagacacg

SEQ ID NO: 58817 - RNA, 19 nt, Artificial Sequence
  Sense Oligo
gugucuagggaaggcgaug

SEQ ID NO: 58818 - RNA, 19 nt, Artificial Sequence
  Antisense Oligo
caucgccuucccuagacac

SEQ ID NO: 58819 - RNA, 19 nt, Artificial Sequence
  Sense Oligo
ugucuagggaaggcgaugc

SEQ ID NO: 58820 - RNA, 19 nt, Artificial Sequence
  Antisense Oligo
gcaucgccuucccuagaca

SEQ ID NO: 58821 - RNA, 19 nt, Artificial Sequence
  Sense Oligo
gucuagggaaggcgaugcc

SEQ ID NO: 58822 - RNA, 19 nt, Artificial Sequence
  Antisense Oligo
ggcaucgccuucccuagac

SEQ ID NO: 58823 - RNA, 19 nt, Artificial Sequence
  Sense Oligo
cuggaaggagcugcucugu

SEQ ID NO: 58824 - RNA, 19 nt, Artificial Sequence
  Antisense Oligo
acagagcagcuccuuccag

SEQ ID NO: 58825 - RNA, 19 nt, Artificial Sequence
  Sense Oligo
uggaaggagcugcucuguu

SEQ ID NO: 58826 - RNA, 19 nt, Artificial Sequence
  Antisense Oligo
aacagagcagcuccuucca

SEQ ID NO: 58827 - RNA, 19 nt, Artificial Sequence
  Sense Oligo
ggaaggagcugcucuguuc

SEQ ID NO: 58828 - RNA, 19 nt, Artificial Sequence
  Antisense Oligo
gaacagagcagcuccuucc

SEQ ID NO: 58829 - RNA, 19 nt, Artificial Sequence
  Sense Oligo
gagcugcucuguucccucc

SEQ ID NO: 58830 - RNA, 19 nt, Artificial Sequence
  Antisense Oligo
ggagggaacagagcagcuc

SEQ ID NO: 58831 - RNA, 19 nt, Artificial Sequence
  Sense Oligo
ccugccuggcuaagaccug

SEQ ID NO: 58832 - RNA, 19 nt, Artificial Sequence
  Antisense Oligo
caggucuuagccaggcagg

SEQ ID NO: 58833 - RNA, 19 nt, Artificial Sequence
  Sense Oligo
cugccuggcuaagaccugc

SEQ ID NO: 58834 - RNA, 19 nt, Artificial Sequence
  Antisense Oligo
gcaggucuuagccaggcag

SEQ ID NO: 58835 - RNA, 19 nt, Artificial Sequence
  Sense Oligo
ugccuggcuaagaccugcg

SEQ ID NO: 58836 - RNA, 19 nt, Artificial Sequence
  Antisense Oligo
cgcaggucuuagccaggca

SEQ ID NO: 58837 - RNA, 19 nt, Artificial Sequence
  Sense Oligo
ccuggcuaagaccugcggu

SEQ ID NO: 58838 - RNA, 19 nt, Artificial Sequence
  Antisense Oligo
accgcaggucuuagccagg

SEQ ID NO: 58839 - RNA, 19 nt, Artificial Sequence
  Sense Oligo
cuggcuaagaccugcggua

SEQ ID NO: 58840 - RNA, 19 nt, Artificial Sequence
  Antisense Oligo
uaccgcaggucuuagccag

SEQ ID NO: 58841 - RNA, 19 nt, Artificial Sequence
  Sense Oligo
uggcuaagaccugcgguau

SEQ ID NO: 58842 - RNA, 19 nt, Artificial Sequence
  Antisense Oligo
auaccgcaggucuuagcca

SEQ ID NO: 58843 - RNA, 19 nt, Artificial Sequence
  Sense Oligo
ggcuaagaccugcgguauu

SEQ ID NO: 58844 - RNA, 19 nt, Artificial Sequence
  Antisense Oligo
aauaccgcaggucuuagcc

SEQ ID NO: 58845 - RNA, 19 nt, Artificial Sequence
  Sense Oligo
gcuaagaccugcgguauuc

SEQ ID NO: 58846 - RNA, 19 nt, Artificial Sequence
  Antisense Oligo
gaauaccgcaggucuuagc

SEQ ID NO: 58847 - RNA, 19 nt, Artificial Sequence
  Sense Oligo
cuaagaccugcgguauucg

SEQ ID NO: 58848 - RNA, 19 nt, Artificial Sequence
  Antisense Oligo
cgaauaccgcaggucuuag

SEQ ID NO: 58849 - RNA, 19 nt, Artificial Sequence
  Sense Oligo
uaagaccugcgguauucgg

SEQ ID NO: 58850 - RNA, 19 nt, Artificial Sequence
  Antisense Oligo
ccgaauaccgcaggucuua

SEQ ID NO: 58851 - RNA, 19 nt, Artificial Sequence
  Sense Oligo
aagaccugcgguauucggg

SEQ ID NO: 58852 - RNA, 19 nt, Artificial Sequence
  Antisense Oligo
cccgaauaccgcaggucuu

SEQ ID NO: 58853 - RNA, 19 nt, Artificial Sequence
  Sense Oligo
agaccugcgguauucggga

SEQ ID NO: 58854 - RNA, 19 nt, Artificial Sequence
  Antisense Oligo
ucccgaauaccgcaggucu

SEQ ID NO: 58855 - RNA, 19 nt, Artificial Sequence
  Sense Oligo
gaccugcgguauucgggag

SEQ ID NO: 58856 - RNA, 19 nt, Artificial Sequence
  Antisense Oligo
cucccgaauaccgcagguc

SEQ ID NO: 58857 - RNA, 19 nt, Artificial Sequence
  Sense Oligo
accugcgguauucgggagc

SEQ ID NO: 58858 - RNA, 19 nt, Artificial Sequence
  Antisense Oligo
gcucccgaauaccgcaggu

SEQ ID NO: 58859 - RNA, 19 nt, Artificial Sequence
  Sense Oligo
cugcgguauucgggagcgu

SEQ ID NO: 58860 - RNA, 19 nt, Artificial Sequence
  Antisense Oligo
acgcucccgaauaccgcag

SEQ ID NO: 58861 - RNA, 19 nt, Artificial Sequence
  Sense Oligo
ugcgguauucgggagcguc

SEQ ID NO: 58862 - RNA, 19 nt, Artificial Sequence
  Antisense Oligo
gacgcucccgaauaccgca

SEQ ID NO: 58863 - RNA, 19 nt, Artificial Sequence
  Sense Oligo
gcgguauucgggagcgucu

SEQ ID NO: 58864 - RNA, 19 nt, Artificial Sequence
  Antisense Oligo
agacgcucccgaauaccgc

SEQ ID NO: 58865 - RNA, 19 nt, Artificial Sequence
  Sense Oligo
cgguauucgggagcgucug

SEQ ID NO: 58866 - RNA, 19 nt, Artificial Sequence
  Antisense Oligo
cagacgcucccgaauaccg

SEQ ID NO: 58867 - RNA, 19 nt, Artificial Sequence
  Sense Oligo
gguauucgggagcgucugc

SEQ ID NO: 58868 - RNA, 19 nt, Artificial Sequence
  Antisense Oligo
gcagacgcucccgaauacc

SEQ ID NO: 58869 - RNA, 19 nt, Artificial Sequence
  Sense Oligo
guauucgggagcgucugca

SEQ ID NO: 58870 - RNA, 19 nt, Artificial Sequence
  Antisense Oligo
ugcagacgcucccgaauac

SEQ ID NO: 58871 - RNA, 19 nt, Artificial Sequence
  Sense Oligo
ucugcacgcaaguguucag

SEQ ID NO: 58872 - RNA, 19 nt, Artificial Sequence
  Antisense Oligo
cugaacacuugcgugcaga

SEQ ID NO: 58873 - RNA, 19 nt, Artificial Sequence
  Sense Oligo
cugcacgcaaguguucagu

SEQ ID NO: 58874 - RNA, 19 nt, Artificial Sequence
  Antisense Oligo
acugaacacuugcgugcag

SEQ ID NO: 58875 - RNA, 19 nt, Artificial Sequence
  Sense Oligo
ugcacgcaaguguucagug

SEQ ID NO: 58876 - RNA, 19 nt, Artificial Sequence
  Antisense Oligo
cacugaacacuugcgugca

SEQ ID NO: 58877 - RNA, 19 nt, Artificial Sequence
  Sense Oligo
gcacgcaaguguucagugu

SEQ ID NO: 58878 - RNA, 19 nt, Artificial Sequence
  Antisense Oligo
acacugaacacuugcgugc

SEQ ID NO: 58879 - RNA, 19 nt, Artificial Sequence
  Sense Oligo
cacgcaaguguucagugug

SEQ ID NO: 58880 - RNA, 19 nt, Artificial Sequence
  Antisense Oligo
cacacugaacacuugcgug

SEQ ID NO: 58881 - RNA, 19 nt, Artificial Sequence
  Sense Oligo
cgcaaguguucagugugca

SEQ ID NO: 58882 - RNA, 19 nt, Artificial Sequence
  Antisense Oligo
ugcacacugaacacuugcg

SEQ ID NO: 58883 - RNA, 19 nt, Artificial Sequence
  Sense Oligo
guguucagugugcauauau

SEQ ID NO: 58884 - RNA, 19 nt, Artificial Sequence
  Antisense Oligo
auauaugcacacugaacac

SEQ ID NO: 58885 - RNA, 19 nt, Artificial Sequence
  Sense Oligo
uguucagugugcauauaug

SEQ ID NO: 58886 - RNA, 19 nt, Artificial Sequence
  Antisense Oligo
cauauaugcacacugaaca

SEQ ID NO: 58887 - RNA, 19 nt, Artificial Sequence
  Sense Oligo
guucagugugcauauaugg

SEQ ID NO: 58888 - RNA, 19 nt, Artificial Sequence
  Antisense Oligo
ccauauaugcacacugaac

SEQ ID NO: 58889 - RNA, 19 nt, Artificial Sequence
  Sense Oligo
uucagugugcauauauggg

SEQ ID NO: 58890 - RNA, 19 nt, Artificial Sequence
  Antisense Oligo
cccauauaugcacacugaa

SEQ ID NO: 58891 - RNA, 19 nt, Artificial Sequence
  Sense Oligo
gggagucuucaguuccgaa

SEQ ID NO: 58892 - RNA, 19 nt, Artificial Sequence
  Antisense Oligo
uucggaacugaagacuccc

SEQ ID NO: 58893 - RNA, 19 nt, Artificial Sequence
  Sense Oligo
ucaguuccgaagucagccc

SEQ ID NO: 58894 - RNA, 19 nt, Artificial Sequence
  Antisense Oligo
gggcugacuucggaacuga

SEQ ID NO: 58895 - RNA, 19 nt, Artificial Sequence
  Sense Oligo
ugucaaaggaucaaucacc

SEQ ID NO: 58896 - RNA, 19 nt, Artificial Sequence
  Antisense Oligo
ggugauugauccuuugaca

SEQ ID NO: 58897 - RNA, 19 nt, Artificial Sequence
  Sense Oligo
gucaaaggaucaaucacca

SEQ ID NO: 58898 - RNA, 19 nt, Artificial Sequence
  Antisense Oligo
uggugauugauccuuugac

SEQ ID NO: 58899 - RNA, 19 nt, Artificial Sequence
  Sense Oligo
ucaaaggaucaaucaccau

SEQ ID NO: 58900 - RNA, 19 nt, Artificial Sequence
  Antisense Oligo
auggugauugauccuuuga

SEQ ID NO: 58901 - RNA, 19 nt, Artificial Sequence
  Sense Oligo
caaaggaucaaucaccauc

SEQ ID NO: 58902 - RNA, 19 nt, Artificial Sequence
  Antisense Oligo
gauggugauugauccuuug

SEQ ID NO: 58903 - RNA, 19 nt, Artificial Sequence
  Sense Oligo
aaaggaucaaucaccauca

SEQ ID NO: 58904 - RNA, 19 nt, Artificial Sequence
  Antisense Oligo
ugauggugauugauccuuu

SEQ ID NO: 58905 - RNA, 19 nt, Artificial Sequence
  Sense Oligo
aaggaucaaucaccaucac

SEQ ID NO: 58906 - RNA, 19 nt, Artificial Sequence
  Antisense Oligo
gugauggugauugauccuu

SEQ ID NO: 58907 - RNA, 19 nt, Artificial Sequence
  Sense Oligo
aggaucaaucaccaucaca

SEQ ID NO: 58908 - RNA, 19 nt, Artificial Sequence
  Antisense Oligo
ugugauggugauugauccu

SEQ ID NO: 58909 - RNA, 19 nt, Artificial Sequence
  Sense Oligo
ggaucaaucaccaucacag

SEQ ID NO: 58910 - RNA, 19 nt, Artificial Sequence
  Antisense Oligo
cugugauggugauugaucc

SEQ ID NO: 58911 - RNA, 19 nt, Artificial Sequence
  Sense Oligo
gaucaaucaccaucacagu

SEQ ID NO: 58912 - RNA, 19 nt, Artificial Sequence
  Antisense Oligo
acugugauggugauugauc

SEQ ID NO: 58913 - RNA, 19 nt, Artificial Sequence
  Sense Oligo
ucaaucaccaucacaguug

SEQ ID NO: 58914 - RNA, 19 nt, Artificial Sequence
  Antisense Oligo
caacugugauggugauuga

SEQ ID NO: 58915 - RNA, 19 nt, Artificial Sequence
  Sense Oligo
caaucaccaucacaguugu

SEQ ID NO: 58916 - RNA, 19 nt, Artificial Sequence
  Antisense Oligo
acaacugugauggugauug

SEQ ID NO: 58917 - RNA, 19 nt, Artificial Sequence
  Sense Oligo
aaucaccaucacaguugug

SEQ ID NO: 58918 - RNA, 19 nt, Artificial Sequence
  Antisense Oligo
cacaacugugauggugauu

SEQ ID NO: 58919 - RNA, 19 nt, Artificial Sequence
  Sense Oligo
aucaccaucacaguugugu

SEQ ID NO: 58920 - RNA, 19 nt, Artificial Sequence
  Antisense Oligo
acacaacugugauggugau

SEQ ID NO: 58921 - RNA, 19 nt, Artificial Sequence
  Sense Oligo
guuuauauguccacaguua

SEQ ID NO: 58922 - RNA, 19 nt, Artificial Sequence
  Antisense Oligo
uaacuguggacauauaaac

SEQ ID NO: 58923 - RNA, 19 nt, Artificial Sequence
  Sense Oligo
uuauauguccacaguuaug

SEQ ID NO: 58924 - RNA, 19 nt, Artificial Sequence
  Antisense Oligo
cauaacuguggacauauaa

SEQ ID NO: 58925 - RNA, 19 nt, Artificial Sequence
  Sense Oligo
uauauguccacaguuaugu

SEQ ID NO: 58926 - RNA, 19 nt, Artificial Sequence
  Antisense Oligo
acauaacuguggacauaua

SEQ ID NO: 58927 - RNA, 19 nt, Artificial Sequence
  Sense Oligo
auauguccacaguuauguu

SEQ ID NO: 58928 - RNA, 19 nt, Artificial Sequence
  Antisense Oligo
aacauaacuguggacauau

SEQ ID NO: 58929 - RNA, 19 nt, Artificial Sequence
  Sense Oligo
uauguccacaguuauguua

SEQ ID NO: 58930 - RNA, 19 nt, Artificial Sequence
  Antisense Oligo
uaacauaacuguggacaua

SEQ ID NO: 58931 - RNA, 19 nt, Artificial Sequence
  Sense Oligo
auguccacaguuauguuaa

SEQ ID NO: 58932 - RNA, 19 nt, Artificial Sequence
  Antisense Oligo
uuaacauaacuguggacau

SEQ ID NO: 58933 - RNA, 19 nt, Artificial Sequence
  Sense Oligo
uguccacaguuauguuaaa

SEQ ID NO: 58934 - RNA, 19 nt, Artificial Sequence
  Antisense Oligo
uuuaacauaacuguggaca

SEQ ID NO: 58935 - RNA, 19 nt, Artificial Sequence
  Sense Oligo
guccacaguuauguuaaaa

SEQ ID NO: 58936 - RNA, 19 nt, Artificial Sequence
  Antisense Oligo
uuuuaacauaacuguggac

SEQ ID NO: 58937 - RNA, 19 nt, Artificial Sequence
  Sense Oligo
auauuguauucacugagcu

SEQ ID NO: 58938 - RNA, 19 nt, Artificial Sequence
  Antisense Oligo
agcucagugaauacaauau

SEQ ID NO: 58939 - RNA, 19 nt, Artificial Sequence
  Sense Oligo
uuguauucacugagcuaac

SEQ ID NO: 58940 - RNA, 19 nt, Artificial Sequence
  Antisense Oligo
guuagcucagugaauacaa

SEQ ID NO: 58941 - RNA, 19 nt, Artificial Sequence
  Sense Oligo
uguauucacugagcuaacu

SEQ ID NO: 58942 - RNA, 19 nt, Artificial Sequence
  Antisense Oligo
aguuagcucagugaauaca

SEQ ID NO: 58943 - RNA, 19 nt, Artificial Sequence
  Sense Oligo
guauucacugagcuaacuu

SEQ ID NO: 58944 - RNA, 19 nt, Artificial Sequence
  Antisense Oligo
aaguuagcucagugaauac

SEQ ID NO: 58945 - RNA, 19 nt, Artificial Sequence
  Sense Oligo
uauucacugagcuaacuuu

SEQ ID NO: 58946 - RNA, 19 nt, Artificial Sequence
  Antisense Oligo
aaaguuagcucagugaaua

SEQ ID NO: 58947 - RNA, 19 nt, Artificial Sequence
  Sense Oligo
auucacugagcuaacuuuc

SEQ ID NO: 58948 - RNA, 19 nt, Artificial Sequence
  Antisense Oligo
gaaaguuagcucagugaau

SEQ ID NO: 58949 - RNA, 19 nt, Artificial Sequence
  Sense Oligo
uucacugagcuaacuuucu

SEQ ID NO: 58950 - RNA, 19 nt, Artificial Sequence
  Antisense Oligo
agaaaguuagcucagugaa

SEQ ID NO: 58951 - RNA, 19 nt, Artificial Sequence
  Sense Oligo
ucacugagcuaacuuucua

SEQ ID NO: 58952 - RNA, 19 nt, Artificial Sequence
  Antisense Oligo
uagaaaguuagcucaguga

SEQ ID NO: 58953 - RNA, 19 nt, Artificial Sequence
  Sense Oligo
cacugagcuaacuuucuau

SEQ ID NO: 58954 - RNA, 19 nt, Artificial Sequence
  Antisense Oligo
auagaaaguuagcucagug

SEQ ID NO: 58955 - RNA, 19 nt, Artificial Sequence
  Sense Oligo
acugagcuaacuuucuauu

SEQ ID NO: 58956 - RNA, 19 nt, Artificial Sequence
  Antisense Oligo
aauagaaaguuagcucagu

SEQ ID NO: 58957 - RNA, 19 nt, Artificial Sequence
  Sense Oligo
cugagcuaacuuucuauuu

SEQ ID NO: 58958 - RNA, 19 nt, Artificial Sequence
  Antisense Oligo
aaauagaaaguuagcucag

SEQ ID NO: 58959 - RNA, 19 nt, Artificial Sequence
  Sense Oligo
ugguuauaugguuaucugu

SEQ ID NO: 58960 - RNA, 19 nt, Artificial Sequence
  Antisense Oligo
acagauaaccauauaacca

SEQ ID NO: 58961 - RNA, 19 nt, Artificial Sequence
  Sense Oligo
gguuauaugguuaucugug

SEQ ID NO: 58962 - RNA, 19 nt, Artificial Sequence
  Antisense Oligo
cacagauaaccauauaacc

SEQ ID NO: 58963 - RNA, 19 nt, Artificial Sequence
  Sense Oligo
augguuaucugugaguggu

SEQ ID NO: 58964 - RNA, 19 nt, Artificial Sequence
  Antisense Oligo
accacucacagauaaccau

SEQ ID NO: 58965 - RNA, 19 nt, Artificial Sequence
  Sense Oligo
gguuaucugugaguggugg

SEQ ID NO: 58966 - RNA, 19 nt, Artificial Sequence
  Antisense Oligo
ccaccacucacagauaacc

SEQ ID NO: 58967 - RNA, 19 nt, Artificial Sequence
  Sense Oligo
aucugugagugguggaauu

SEQ ID NO: 58968 - RNA, 19 nt, Artificial Sequence
  Antisense Oligo
aauuccaccacucacagau

SEQ ID NO: 58969 - RNA, 19 nt, Artificial Sequence
  Sense Oligo
cugugagugguggaauuaa

SEQ ID NO: 58970 - RNA, 19 nt, Artificial Sequence
  Antisense Oligo
uuaauuccaccacucacag

SEQ ID NO: 58971 - RNA, 19 nt, Artificial Sequence
  Sense Oligo
gugagugguggaauuaaga

SEQ ID NO: 58972 - RNA, 19 nt, Artificial Sequence
  Antisense Oligo
ucuuaauuccaccacucac

SEQ ID NO: 58973 - RNA, 19 nt, Artificial Sequence
  Sense Oligo
ugagugguggaauuaagag

SEQ ID NO: 58974 - RNA, 19 nt, Artificial Sequence
  Antisense Oligo
cucuuaauuccaccacuca

SEQ ID NO: 58975 - RNA, 19 nt, Artificial Sequence
  Sense Oligo
gagugguggaauuaagagu

SEQ ID NO: 58976 - RNA, 19 nt, Artificial Sequence
  Antisense Oligo
acucuuaauuccaccacuc

SEQ ID NO: 58977 - RNA, 19 nt, Artificial Sequence
  Sense Oligo
agugguggaauuaagagug

SEQ ID NO: 58978 - RNA, 19 nt, Artificial Sequence
  Antisense Oligo
cacucuuaauuccaccacu

SEQ ID NO: 58979 - RNA, 19 nt, Artificial Sequence
  Sense Oligo
agagugauuuucuuuugcu

SEQ ID NO: 58980 - RNA, 19 nt, Artificial Sequence
  Antisense Oligo
agcaaaagaaaaucacucu

SEQ ID NO: 58981 - RNA, 19 nt, Artificial Sequence
  Sense Oligo
gagugauuuucuuuugcua

SEQ ID NO: 58982 - RNA, 19 nt, Artificial Sequence
  Antisense Oligo
uagcaaaagaaaaucacuc

SEQ ID NO: 58983 - RNA, 19 nt, Artificial Sequence
  Sense Oligo
caauaauagcaagaagaag

SEQ ID NO: 58984 - RNA, 19 nt, Artificial Sequence
  Antisense Oligo
cuucuucuugcuauuauug

SEQ ID NO: 58985 - RNA, 19 nt, Artificial Sequence
  Sense Oligo
auaauagcaagaagaaguc

SEQ ID NO: 58986 - RNA, 19 nt, Artificial Sequence
  Antisense Oligo
gacuucuucuugcuauuau

SEQ ID NO: 58987 - RNA, 19 nt, Artificial Sequence
  Sense Oligo
uaauagcaagaagaagucc

SEQ ID NO: 58988 - RNA, 19 nt, Artificial Sequence
  Antisense Oligo
ggacuucuucuugcuauua

SEQ ID NO: 58989 - RNA, 19 nt, Artificial Sequence
  Sense Oligo
aauagcaagaagaaguccu

SEQ ID NO: 58990 - RNA, 19 nt, Artificial Sequence
  Antisense Oligo
aggacuucuucuugcuauu

SEQ ID NO: 58991 - RNA, 19 nt, Artificial Sequence
  Sense Oligo
auagcaagaagaaguccug

SEQ ID NO: 58992 - RNA, 19 nt, Artificial Sequence
  Antisense Oligo
caggacuucuucuugcuau

SEQ ID NO: 58993 - RNA, 19 nt, Artificial Sequence
  Sense Oligo
uagcaagaagaaguccugc

SEQ ID NO: 58994 - RNA, 19 nt, Artificial Sequence
  Antisense Oligo
gcaggacuucuucuugcua

SEQ ID NO: 58995 - RNA, 19 nt, Artificial Sequence
  Sense Oligo
gcaagaagaaguccugccc

SEQ ID NO: 58996 - RNA, 19 nt, Artificial Sequence
  Antisense Oligo
gggcaggacuucuucuugc

SEQ ID NO: 58997 - RNA, 19 nt, Artificial Sequence
  Sense Oligo
aaaaucugcucccaccuca

SEQ ID NO: 58998 - RNA, 19 nt, Artificial Sequence
  Antisense Oligo
ugaggugggagcagauuuu

SEQ ID NO: 58999 - RNA, 19 nt, Artificial Sequence
  Sense Oligo
aaaucugcucccaccucag

SEQ ID NO: 59000 - RNA, 19 nt, Artificial Sequence
  Antisense Oligo
cugaggugggagcagauuu

SEQ ID NO: 59001 - RNA, 19 nt, Artificial Sequence
  Sense Oligo
aaucugcucccaccucagg

SEQ ID NO: 59002 - RNA, 19 nt, Artificial Sequence
  Antisense Oligo
ccugaggugggagcagauu

SEQ ID NO: 59003 - RNA, 19 nt, Artificial Sequence
  Sense Oligo
aucugcucccaccucaggu

SEQ ID NO: 59004 - RNA, 19 nt, Artificial Sequence
  Antisense Oligo
accugaggugggagcagau

SEQ ID NO: 59005 - RNA, 19 nt, Artificial Sequence
  Sense Oligo
ucugcucccaccucaggua

SEQ ID NO: 59006 - RNA, 19 nt, Artificial Sequence
  Antisense Oligo
uaccugaggugggagcaga

SEQ ID NO: 59007 - RNA, 19 nt, Artificial Sequence
  Sense Oligo
cugcucccaccucagguac

SEQ ID NO: 59008 - RNA, 19 nt, Artificial Sequence
  Antisense Oligo
guaccugaggugggagcag

SEQ ID NO: 59009 - RNA, 19 nt, Artificial Sequence
  Sense Oligo
ugcucccaccucagguacu

SEQ ID NO: 59010 - RNA, 19 nt, Artificial Sequence
  Antisense Oligo
aguaccugaggugggagca

SEQ ID NO: 59011 - RNA, 19 nt, Artificial Sequence
  Sense Oligo
gcucccaccucagguacuu

SEQ ID NO: 59012 - RNA, 19 nt, Artificial Sequence
  Antisense Oligo
aaguaccugaggugggagc

SEQ ID NO: 59013 - RNA, 19 nt, Artificial Sequence
  Sense Oligo
cucccaccucagguacuuc

SEQ ID NO: 59014 - RNA, 19 nt, Artificial Sequence
  Antisense Oligo
gaaguaccugaggugggag

SEQ ID NO: 59015 - RNA, 19 nt, Artificial Sequence
  Sense Oligo
ucccaccucagguacuucu

SEQ ID NO: 59016 - RNA, 19 nt, Artificial Sequence
  Antisense Oligo
agaaguaccugagguggga

SEQ ID NO: 59017 - RNA, 19 nt, Artificial Sequence
  Sense Oligo
cccaccucagguacuucuu

SEQ ID NO: 59018 - RNA, 19 nt, Artificial Sequence
  Antisense Oligo
aagaaguaccugagguggg

SEQ ID NO: 59019 - RNA, 19 nt, Artificial Sequence
  Sense Oligo
ccucagguacuucuuugcc

SEQ ID NO: 59020 - RNA, 19 nt, Artificial Sequence
  Antisense Oligo
ggcaaagaaguaccugagg

SEQ ID NO: 59021 - RNA, 19 nt, Artificial Sequence
  Sense Oligo
cucagguacuucuuugccu

SEQ ID NO: 59022 - RNA, 19 nt, Artificial Sequence
  Antisense Oligo
aggcaaagaaguaccugag

SEQ ID NO: 59023 - RNA, 19 nt, Artificial Sequence
  Sense Oligo
agguacuucuuugccugaa

SEQ ID NO: 59024 - RNA, 19 nt, Artificial Sequence
  Antisense Oligo
uucaggcaaagaaguaccu

SEQ ID NO: 59025 - RNA, 19 nt, Artificial Sequence
  Sense Oligo
acuggcauuccuauuuauu

SEQ ID NO: 59026 - RNA, 19 nt, Artificial Sequence
  Antisense Oligo
aauaaauaggaaugccagu

SEQ ID NO: 59027 - RNA, 19 nt, Artificial Sequence
  Sense Oligo
cuggcauuccuauuuauuu

SEQ ID NO: 59028 - RNA, 19 nt, Artificial Sequence
  Antisense Oligo
aaauaaauaggaaugccag

SEQ ID NO: 59029 - RNA, 19 nt, Artificial Sequence
  Sense Oligo
ggcauuccuauuuauuuuc

SEQ ID NO: 59030 - RNA, 19 nt, Artificial Sequence
  Antisense Oligo
gaaaauaaauaggaaugcc

SEQ ID NO: 59031 - RNA, 19 nt, Artificial Sequence
  Sense Oligo
aagccucuuauucuggugg

SEQ ID NO: 59032 - RNA, 19 nt, Artificial Sequence
  Antisense Oligo
ccaccagaauaagaggcuu

SEQ ID NO: 59033 - RNA, 19 nt, Artificial Sequence
  Sense Oligo
agccucuuauucugguggg

SEQ ID NO: 59034 - RNA, 19 nt, Artificial Sequence
  Antisense Oligo
cccaccagaauaagaggcu

SEQ ID NO: 59035 - RNA, 19 nt, Artificial Sequence
  Sense Oligo
ucuuauucuggugggauuu

SEQ ID NO: 59036 - RNA, 19 nt, Artificial Sequence
  Antisense Oligo
aaaucccaccagaauaaga

SEQ ID NO: 59037 - RNA, 19 nt, Artificial Sequence
  Sense Oligo
cuuauucuggugggauuuc

SEQ ID NO: 59038 - RNA, 19 nt, Artificial Sequence
  Antisense Oligo
gaaaucccaccagaauaag

SEQ ID NO: 59039 - RNA, 19 nt, Artificial Sequence
  Sense Oligo
ggugggauuucagcaaagu

SEQ ID NO: 59040 - RNA, 19 nt, Artificial Sequence
  Antisense Oligo
acuuugcugaaaucccacc

SEQ ID NO: 59041 - RNA, 19 nt, Artificial Sequence
  Sense Oligo
gugggauuucagcaaagug

SEQ ID NO: 59042 - RNA, 19 nt, Artificial Sequence
  Antisense Oligo
cacuuugcugaaaucccac

SEQ ID NO: 59043 - RNA, 19 nt, Artificial Sequence
  Sense Oligo
ugggauuucagcaaaguga

SEQ ID NO: 59044 - RNA, 19 nt, Artificial Sequence
  Antisense Oligo
ucacuuugcugaaauccca

SEQ ID NO: 59045 - RNA, 19 nt, Artificial Sequence
  Sense Oligo
cacacccagagucacacug

SEQ ID NO: 59046 - RNA, 19 nt, Artificial Sequence
  Antisense Oligo
cagugugacucugggugug

SEQ ID NO: 59047 - RNA, 19 nt, Artificial Sequence
  Sense Oligo
acacccagagucacacuga

SEQ ID NO: 59048 - RNA, 19 nt, Artificial Sequence
  Antisense Oligo
ucagugugacucugggugu

SEQ ID NO: 59049 - RNA, 19 nt, Artificial Sequence
  Sense Oligo
cacccagagucacacugau

SEQ ID NO: 59050 - RNA, 19 nt, Artificial Sequence
  Antisense Oligo
aucagugugacucugggug

SEQ ID NO: 59051 - RNA, 19 nt, Artificial Sequence
  Sense Oligo
acccagagucacacugaug

SEQ ID NO: 59052 - RNA, 19 nt, Artificial Sequence
  Antisense Oligo
caucagugugacucugggu

SEQ ID NO: 59053 - RNA, 19 nt, Artificial Sequence
  Sense Oligo
cccagagucacacugauga

SEQ ID NO: 59054 - RNA, 19 nt, Artificial Sequence
  Antisense Oligo
ucaucagugugacucuggg

SEQ ID NO: 59055 - RNA, 19 nt, Artificial Sequence
  Sense Oligo
ccagagucacacugaugaa

SEQ ID NO: 59056 - RNA, 19 nt, Artificial Sequence
  Antisense Oligo
uucaucagugugacucugg

SEQ ID NO: 59057 - RNA, 19 nt, Artificial Sequence
  Sense Oligo
aaugacagaauccuggaag

SEQ ID NO: 59058 - RNA, 19 nt, Artificial Sequence
  Antisense Oligo
cuuccaggauucugucauu

SEQ ID NO: 59059 - RNA, 19 nt, Artificial Sequence
  Sense Oligo
augacagaauccuggaagc

SEQ ID NO: 59060 - RNA, 19 nt, Artificial Sequence
  Antisense Oligo
gcuuccaggauucugucau

SEQ ID NO: 59061 - RNA, 19 nt, Artificial Sequence
  Sense Oligo
gacagaauccuggaagcag

SEQ ID NO: 59062 - RNA, 19 nt, Artificial Sequence
  Antisense Oligo
cugcuuccaggauucuguc

SEQ ID NO: 59063 - RNA, 19 nt, Artificial Sequence
  Sense Oligo
uggaagcagguggacaguu

SEQ ID NO: 59064 - RNA, 19 nt, Artificial Sequence
  Antisense Oligo
aacuguccaccugcuucca

SEQ ID NO: 59065 - RNA, 19 nt, Artificial Sequence
  Sense Oligo
ggaagcagguggacaguuc

SEQ ID NO: 59066 - RNA, 19 nt, Artificial Sequence
  Antisense Oligo
gaacuguccaccugcuucc

SEQ ID NO: 59067 - RNA, 19 nt, Artificial Sequence
  Sense Oligo
gaagcagguggacaguucc

SEQ ID NO: 59068 - RNA, 19 nt, Artificial Sequence
  Antisense Oligo
ggaacuguccaccugcuuc

SEQ ID NO: 59069 - RNA, 19 nt, Artificial Sequence
  Sense Oligo
cagguggacaguucccgca

SEQ ID NO: 59070 - RNA, 19 nt, Artificial Sequence
  Antisense Oligo
ugcgggaacuguccaccug

SEQ ID NO: 59071 - RNA, 19 nt, Artificial Sequence
  Sense Oligo
agguggacaguucccgcag

SEQ ID NO: 59072 - RNA, 19 nt, Artificial Sequence
  Antisense Oligo
cugcgggaacuguccaccu

SEQ ID NO: 59073 - RNA, 19 nt, Artificial Sequence
  Sense Oligo
guggacaguucccgcagca

SEQ ID NO: 59074 - RNA, 19 nt, Artificial Sequence
  Antisense Oligo
ugcugcgggaacuguccac

SEQ ID NO: 59075 - RNA, 19 nt, Artificial Sequence
  Sense Oligo
uggacaguucccgcagcac

SEQ ID NO: 59076 - RNA, 19 nt, Artificial Sequence
  Antisense Oligo
gugcugcgggaacugucca

SEQ ID NO: 59077 - RNA, 19 nt, Artificial Sequence
  Sense Oligo
ccgcagcacuccacaucug

SEQ ID NO: 59078 - RNA, 19 nt, Artificial Sequence
  Antisense Oligo
cagauguggagugcugcgg

SEQ ID NO: 59079 - RNA, 19 nt, Artificial Sequence
  Sense Oligo
cgcagcacuccacaucugu

SEQ ID NO: 59080 - RNA, 19 nt, Artificial Sequence
  Antisense Oligo
acagauguggagugcugcg

SEQ ID NO: 59081 - RNA, 19 nt, Artificial Sequence
  Sense Oligo
gcagcacuccacaucugug

SEQ ID NO: 59082 - RNA, 19 nt, Artificial Sequence
  Antisense Oligo
cacagauguggagugcugc

SEQ ID NO: 59083 - RNA, 19 nt, Artificial Sequence
  Sense Oligo
cagcacuccacaucugugu

SEQ ID NO: 59084 - RNA, 19 nt, Artificial Sequence
  Antisense Oligo
acacagauguggagugcug

SEQ ID NO: 59085 - RNA, 19 nt, Artificial Sequence
  Sense Oligo
acaucuguguggucugccu

SEQ ID NO: 59086 - RNA, 19 nt, Artificial Sequence
  Antisense Oligo
aggcagaccacacagaugu

SEQ ID NO: 59087 - RNA, 19 nt, Artificial Sequence
  Sense Oligo
ucugccucaggguuugggu

SEQ ID NO: 59088 - RNA, 19 nt, Artificial Sequence
  Antisense Oligo
acccaaacccugaggcaga

SEQ ID NO: 59089 - RNA, 19 nt, Artificial Sequence
  Sense Oligo
cugccucaggguuugggug

SEQ ID NO: 59090 - RNA, 19 nt, Artificial Sequence
  Antisense Oligo
cacccaaacccugaggcag

SEQ ID NO: 59091 - RNA, 19 nt, Artificial Sequence
  Sense Oligo
ugccucaggguuugggugg

SEQ ID NO: 59092 - RNA, 19 nt, Artificial Sequence
  Antisense Oligo
ccacccaaacccugaggca

SEQ ID NO: 59093 - RNA, 19 nt, Artificial Sequence
  Sense Oligo
ccucaggguuuggguggca

SEQ ID NO: 59094 - RNA, 19 nt, Artificial Sequence
  Antisense Oligo
ugccacccaaacccugagg

SEQ ID NO: 59095 - RNA, 19 nt, Artificial Sequence
  Sense Oligo
cucaggguuuggguggcag

SEQ ID NO: 59096 - RNA, 19 nt, Artificial Sequence
  Antisense Oligo
cugccacccaaacccugag

SEQ ID NO: 59097 - RNA, 19 nt, Artificial Sequence
  Sense Oligo
ucaggguuuggguggcagc

SEQ ID NO: 59098 - RNA, 19 nt, Artificial Sequence
  Antisense Oligo
gcugccacccaaacccuga

SEQ ID NO: 59099 - RNA, 19 nt, Artificial Sequence
  Sense Oligo
uuggguggcagcagcugag

SEQ ID NO: 59100 - RNA, 19 nt, Artificial Sequence
  Antisense Oligo
cucagcugcugccacccaa

SEQ ID NO: 59101 - RNA, 19 nt, Artificial Sequence
  Sense Oligo
gguagccugggccacucuu

SEQ ID NO: 59102 - RNA, 19 nt, Artificial Sequence
  Antisense Oligo
aagaguggcccaggcuacc

SEQ ID NO: 59103 - RNA, 19 nt, Artificial Sequence
  Sense Oligo
guagccugggccacucuua

SEQ ID NO: 59104 - RNA, 19 nt, Artificial Sequence
  Antisense Oligo
uaagaguggcccaggcuac

SEQ ID NO: 59105 - RNA, 19 nt, Artificial Sequence
  Sense Oligo
uagccugggccacucuuac

SEQ ID NO: 59106 - RNA, 19 nt, Artificial Sequence
  Antisense Oligo
guaagaguggcccaggcua

SEQ ID NO: 59107 - RNA, 19 nt, Artificial Sequence
  Sense Oligo
agccugggccacucuuacu

SEQ ID NO: 59108 - RNA, 19 nt, Artificial Sequence
  Antisense Oligo
aguaagaguggcccaggcu

SEQ ID NO: 59109 - RNA, 19 nt, Artificial Sequence
  Sense Oligo
gccugggccacucuuacua

SEQ ID NO: 59110 - RNA, 19 nt, Artificial Sequence
  Antisense Oligo
uaguaagaguggcccaggc

SEQ ID NO: 59111 - RNA, 19 nt, Artificial Sequence
  Sense Oligo
ccugggccacucuuacuau

SEQ ID NO: 59112 - RNA, 19 nt, Artificial Sequence
  Antisense Oligo
auaguaagaguggcccagg

SEQ ID NO: 59113 - RNA, 19 nt, Artificial Sequence
  Sense Oligo
cugggccacucuuacuauu

SEQ ID NO: 59114 - RNA, 19 nt, Artificial Sequence
  Antisense Oligo
aauaguaagaguggcccag

SEQ ID NO: 59115 - RNA, 19 nt, Artificial Sequence
  Sense Oligo
ugggccacucuuacuauug

SEQ ID NO: 59116 - RNA, 19 nt, Artificial Sequence
  Antisense Oligo
caauaguaagaguggccca

SEQ ID NO: 59117 - RNA, 19 nt, Artificial Sequence
  Sense Oligo
gggccacucuuacuauuga

SEQ ID NO: 59118 - RNA, 19 nt, Artificial Sequence
  Antisense Oligo
ucaauaguaagaguggccc

SEQ ID NO: 59119 - RNA, 19 nt, Artificial Sequence
  Sense Oligo
ggccacucuuacuauugag

SEQ ID NO: 59120 - RNA, 19 nt, Artificial Sequence
  Antisense Oligo
cucaauaguaagaguggcc

SEQ ID NO: 59121 - RNA, 19 nt, Artificial Sequence
  Sense Oligo
gccacucuuacuauugagc

SEQ ID NO: 59122 - RNA, 19 nt, Artificial Sequence
  Antisense Oligo
gcucaauaguaagaguggc

SEQ ID NO: 59123 - RNA, 19 nt, Artificial Sequence
  Sense Oligo
ccacucuuacuauugagcu

SEQ ID NO: 59124 - RNA, 19 nt, Artificial Sequence
  Antisense Oligo
agcucaauaguaagagugg

SEQ ID NO: 59125 - RNA, 19 nt, Artificial Sequence
  Sense Oligo
cacucuuacuauugagcuc

SEQ ID NO: 59126 - RNA, 19 nt, Artificial Sequence
  Antisense Oligo
gagcucaauaguaagagug

SEQ ID NO: 59127 - RNA, 19 nt, Artificial Sequence
  Sense Oligo
acucuuacuauugagcuca

SEQ ID NO: 59128 - RNA, 19 nt, Artificial Sequence
  Antisense Oligo
ugagcucaauaguaagagu

SEQ ID NO: 59129 - RNA, 19 nt, Artificial Sequence
  Sense Oligo
cucuuacuauugagcucaa

SEQ ID NO: 59130 - RNA, 19 nt, Artificial Sequence
  Antisense Oligo
uugagcucaauaguaagag

SEQ ID NO: 59131 - RNA, 19 nt, Artificial Sequence
  Sense Oligo
ucuuacuauugagcucaag

SEQ ID NO: 59132 - RNA, 19 nt, Artificial Sequence
  Antisense Oligo
cuugagcucaauaguaaga

SEQ ID NO: 59133 - RNA, 19 nt, Artificial Sequence
  Sense Oligo
cuuacuauugagcucaagu

SEQ ID NO: 59134 - RNA, 19 nt, Artificial Sequence
  Antisense Oligo
acuugagcucaauaguaag

SEQ ID NO: 59135 - RNA, 19 nt, Artificial Sequence
  Sense Oligo
uuacuauugagcucaaguu

SEQ ID NO: 59136 - RNA, 19 nt, Artificial Sequence
  Antisense Oligo
aacuugagcucaauaguaa

SEQ ID NO: 59137 - RNA, 19 nt, Artificial Sequence
  Sense Oligo
uacuauugagcucaaguuc

SEQ ID NO: 59138 - RNA, 19 nt, Artificial Sequence
  Antisense Oligo
gaacuugagcucaauagua

SEQ ID NO: 59139 - RNA, 19 nt, Artificial Sequence
  Sense Oligo
acuauugagcucaaguucu

SEQ ID NO: 59140 - RNA, 19 nt, Artificial Sequence
  Antisense Oligo
agaacuugagcucaauagu

SEQ ID NO: 59141 - RNA, 19 nt, Artificial Sequence
  Sense Oligo
cuauugagcucaaguucug

SEQ ID NO: 59142 - RNA, 19 nt, Artificial Sequence
  Antisense Oligo
cagaacuugagcucaauag

SEQ ID NO: 59143 - RNA, 19 nt, Artificial Sequence
  Sense Oligo
uauugagcucaaguucugu

SEQ ID NO: 59144 - RNA, 19 nt, Artificial Sequence
  Antisense Oligo
acagaacuugagcucaaua

SEQ ID NO: 59145 - RNA, 19 nt, Artificial Sequence
  Sense Oligo
uugagcucaaguucuguuc

SEQ ID NO: 59146 - RNA, 19 nt, Artificial Sequence
  Antisense Oligo
gaacagaacuugagcucaa

SEQ ID NO: 59147 - RNA, 19 nt, Artificial Sequence
  Sense Oligo
ugagcucaaguucuguucu

SEQ ID NO: 59148 - RNA, 19 nt, Artificial Sequence
  Antisense Oligo
agaacagaacuugagcuca

SEQ ID NO: 59149 - RNA, 19 nt, Artificial Sequence
  Sense Oligo
gagcucaaguucuguucuu

SEQ ID NO: 59150 - RNA, 19 nt, Artificial Sequence
  Antisense Oligo
aagaacagaacuugagcuc

SEQ ID NO: 59151 - RNA, 19 nt, Artificial Sequence
  Sense Oligo
uuuucaaaaugggucuaag

SEQ ID NO: 59152 - RNA, 19 nt, Artificial Sequence
  Antisense Oligo
cuuagacccauuuugaaaa

SEQ ID NO: 59153 - RNA, 19 nt, Artificial Sequence
  Sense Oligo
uuucaaaaugggucuaaga

SEQ ID NO: 59154 - RNA, 19 nt, Artificial Sequence
  Antisense Oligo
ucuuagacccauuuugaaa

SEQ ID NO: 59155 - RNA, 19 nt, Artificial Sequence
  Sense Oligo
aaaaugggucuaagauuac

SEQ ID NO: 59156 - RNA, 19 nt, Artificial Sequence
  Antisense Oligo
guaaucuuagacccauuuu

SEQ ID NO: 59157 - RNA, 19 nt, Artificial Sequence
  Sense Oligo
aaaugggucuaagauuaca

SEQ ID NO: 59158 - RNA, 19 nt, Artificial Sequence
  Antisense Oligo
uguaaucuuagacccauuu

SEQ ID NO: 59159 - RNA, 19 nt, Artificial Sequence
  Sense Oligo
ugauguuaucuucaaaagg

SEQ ID NO: 59160 - RNA, 19 nt, Artificial Sequence
  Antisense Oligo
ccuuuugaagauaacauca

SEQ ID NO: 59161 - RNA, 19 nt, Artificial Sequence
  Sense Oligo
gauguuaucuucaaaaggu

SEQ ID NO: 59162 - RNA, 19 nt, Artificial Sequence
  Antisense Oligo
accuuuugaagauaacauc

SEQ ID NO: 59163 - RNA, 19 nt, Artificial Sequence
  Sense Oligo
auguuaucuucaaaagguc

SEQ ID NO: 59164 - RNA, 19 nt, Artificial Sequence
  Antisense Oligo
gaccuuuugaagauaacau

SEQ ID NO: 59165 - RNA, 19 nt, Artificial Sequence
  Sense Oligo
cuucaaaaggucauuaagu

SEQ ID NO: 59166 - RNA, 19 nt, Artificial Sequence
  Antisense Oligo
acuuaaugaccuuuugaag

SEQ ID NO: 59167 - RNA, 19 nt, Artificial Sequence
  Sense Oligo
ucaaaaggucauuaaguug

SEQ ID NO: 59168 - RNA, 19 nt, Artificial Sequence
  Antisense Oligo
caacuuaaugaccuuuuga

SEQ ID NO: 59169 - RNA, 19 nt, Artificial Sequence
  Sense Oligo
caaaaggucauuaaguugg

SEQ ID NO: 59170 - RNA, 19 nt, Artificial Sequence
  Antisense Oligo
ccaacuuaaugaccuuuug

SEQ ID NO: 59171 - RNA, 19 nt, Artificial Sequence
  Sense Oligo
aaaaggucauuaaguuggu

SEQ ID NO: 59172 - RNA, 19 nt, Artificial Sequence
  Antisense Oligo
accaacuuaaugaccuuuu

SEQ ID NO: 59173 - RNA, 19 nt, Artificial Sequence
  Sense Oligo
aaaggucauuaaguuggug

SEQ ID NO: 59174 - RNA, 19 nt, Artificial Sequence
  Antisense Oligo
caccaacuuaaugaccuuu

SEQ ID NO: 59175 - RNA, 19 nt, Artificial Sequence
  Sense Oligo
aaggucauuaaguuggugg

SEQ ID NO: 59176 - RNA, 19 nt, Artificial Sequence
  Antisense Oligo
ccaccaacuuaaugaccuu

SEQ ID NO: 59177 - RNA, 19 nt, Artificial Sequence
  Sense Oligo
aggucauuaaguugguggu

SEQ ID NO: 59178 - RNA, 19 nt, Artificial Sequence
  Antisense Oligo
accaccaacuuaaugaccu

SEQ ID NO: 59179 - RNA, 19 nt, Artificial Sequence
  Sense Oligo
ggucauuaaguugguggua

SEQ ID NO: 59180 - RNA, 19 nt, Artificial Sequence
  Antisense Oligo
uaccaccaacuuaaugacc

SEQ ID NO: 59181 - RNA, 19 nt, Artificial Sequence
  Sense Oligo
gucauuaaguuggugguaa

SEQ ID NO: 59182 - RNA, 19 nt, Artificial Sequence
  Antisense Oligo
uuaccaccaacuuaaugac

SEQ ID NO: 59183 - RNA, 19 nt, Artificial Sequence
  Sense Oligo
ucauuaaguuggugguaac

SEQ ID NO: 59184 - RNA, 19 nt, Artificial Sequence
  Antisense Oligo
guuaccaccaacuuaauga

SEQ ID NO: 59185 - RNA, 19 nt, Artificial Sequence
  Sense Oligo
uuuaggguuuauuauacgc

SEQ ID NO: 59186 - RNA, 19 nt, Artificial Sequence
  Antisense Oligo
gcguauaauaaacccuaaa

SEQ ID NO: 59187 - RNA, 19 nt, Artificial Sequence
  Sense Oligo
uuaggguuuauuauacgca

SEQ ID NO: 59188 - RNA, 19 nt, Artificial Sequence
  Antisense Oligo
ugcguauaauaaacccuaa

SEQ ID NO: 59189 - RNA, 19 nt, Artificial Sequence
  Sense Oligo
uaggguuuauuauacgcag

SEQ ID NO: 59190 - RNA, 19 nt, Artificial Sequence
  Antisense Oligo
cugcguauaauaaacccua

SEQ ID NO: 59191 - RNA, 19 nt, Artificial Sequence
  Sense Oligo
aggguuuauuauacgcaga

SEQ ID NO: 59192 - RNA, 19 nt, Artificial Sequence
  Antisense Oligo
ucugcguauaauaaacccu

SEQ ID NO: 59193 - RNA, 19 nt, Artificial Sequence
  Sense Oligo
uauacgcagacugcugugu

SEQ ID NO: 59194 - RNA, 19 nt, Artificial Sequence
  Antisense Oligo
acacagcagucugcguaua

SEQ ID NO: 59195 - RNA, 19 nt, Artificial Sequence
  Sense Oligo
auacgcagacugcuguguu

SEQ ID NO: 59196 - RNA, 19 nt, Artificial Sequence
  Antisense Oligo
aacacagcagucugcguau

SEQ ID NO: 59197 - RNA, 19 nt, Artificial Sequence
  Sense Oligo
uacgcagacugcuguguuc

SEQ ID NO: 59198 - RNA, 19 nt, Artificial Sequence
  Antisense Oligo
gaacacagcagucugcgua

SEQ ID NO: 59199 - RNA, 19 nt, Artificial Sequence
  Sense Oligo
acgcagacugcuguguucu

SEQ ID NO: 59200 - RNA, 19 nt, Artificial Sequence
  Antisense Oligo
agaacacagcagucugcgu

SEQ ID NO: 59201 - RNA, 19 nt, Artificial Sequence
  Sense Oligo
gacugcuguguucuuugug

SEQ ID NO: 59202 - RNA, 19 nt, Artificial Sequence
  Antisense Oligo
cacaaagaacacagcaguc

SEQ ID NO: 59203 - RNA, 19 nt, Artificial Sequence
  Sense Oligo
cugcuguguucuuugugcc

SEQ ID NO: 59204 - RNA, 19 nt, Artificial Sequence
  Antisense Oligo
ggcacaaagaacacagcag

SEQ ID NO: 59205 - RNA, 19 nt, Artificial Sequence
  Sense Oligo
ugcuguguucuuugugccu

SEQ ID NO: 59206 - RNA, 19 nt, Artificial Sequence
  Antisense Oligo
aggcacaaagaacacagca

SEQ ID NO: 59207 - RNA, 19 nt, Artificial Sequence
  Sense Oligo
guguucuuugugccuuggg

SEQ ID NO: 59208 - RNA, 19 nt, Artificial Sequence
  Antisense Oligo
cccaaggcacaaagaacac

SEQ ID NO: 59209 - RNA, 19 nt, Artificial Sequence
  Sense Oligo
uguucuuugugccuugggu

SEQ ID NO: 59210 - RNA, 19 nt, Artificial Sequence
  Antisense Oligo
acccaaggcacaaagaaca

SEQ ID NO: 59211 - RNA, 19 nt, Artificial Sequence
  Sense Oligo
guucuuugugccuugggua

SEQ ID NO: 59212 - RNA, 19 nt, Artificial Sequence
  Antisense Oligo
uacccaaggcacaaagaac

SEQ ID NO: 59213 - RNA, 19 nt, Artificial Sequence
  Sense Oligo
ucuuugugccuuggguaac

SEQ ID NO: 59214 - RNA, 19 nt, Artificial Sequence
  Antisense Oligo
guuacccaaggcacaaaga

SEQ ID NO: 59215 - RNA, 19 nt, Artificial Sequence
  Sense Oligo
agggcuuuuaaauuuugac

SEQ ID NO: 59216 - RNA, 19 nt, Artificial Sequence
  Antisense Oligo
gucaaaauuuaaaagcccu

SEQ ID NO: 59217 - RNA, 19 nt, Artificial Sequence
  Sense Oligo
ggcuuuuaaauuuugacac

SEQ ID NO: 59218 - RNA, 19 nt, Artificial Sequence
  Antisense Oligo
gugucaaaauuuaaaagcc

SEQ ID NO: 59219 - RNA, 19 nt, Artificial Sequence
  Sense Oligo
cacagaauugucaacuaaa

SEQ ID NO: 59220 - RNA, 19 nt, Artificial Sequence
  Antisense Oligo
uuuaguugacaauucugug

SEQ ID NO: 59221 - RNA, 19 nt, Artificial Sequence
  Sense Oligo
acagaauugucaacuaaag

SEQ ID NO: 59222 - RNA, 19 nt, Artificial Sequence
  Antisense Oligo
cuuuaguugacaauucugu

SEQ ID NO: 59223 - RNA, 19 nt, Artificial Sequence
  Sense Oligo
cagaauugucaacuaaaga

SEQ ID NO: 59224 - RNA, 19 nt, Artificial Sequence
  Antisense Oligo
ucuuuaguugacaauucug

SEQ ID NO: 59225 - RNA, 19 nt, Artificial Sequence
  Sense Oligo
gcagcugugauuucuccug

SEQ ID NO: 59226 - RNA, 19 nt, Artificial Sequence
  Antisense Oligo
caggagaaaucacagcugc

SEQ ID NO: 59227 - RNA, 19 nt, Artificial Sequence
  Sense Oligo
agcugugauuucuccugaa

SEQ ID NO: 59228 - RNA, 19 nt, Artificial Sequence
  Antisense Oligo
uucaggagaaaucacagcu

SEQ ID NO: 59229 - RNA, 19 nt, Artificial Sequence
  Sense Oligo
cuggagguaagcaguaagu

SEQ ID NO: 59230 - RNA, 19 nt, Artificial Sequence
  Antisense Oligo
acuuacugcuuaccuccag

SEQ ID NO: 59231 - RNA, 19 nt, Artificial Sequence
  Sense Oligo
uggagguaagcaguaagug

SEQ ID NO: 59232 - RNA, 19 nt, Artificial Sequence
  Antisense Oligo
cacuuacugcuuaccucca

SEQ ID NO: 59233 - RNA, 19 nt, Artificial Sequence
  Sense Oligo
ggagguaagcaguaagugc

SEQ ID NO: 59234 - RNA, 19 nt, Artificial Sequence
  Antisense Oligo
gcacuuacugcuuaccucc

SEQ ID NO: 59235 - RNA, 19 nt, Artificial Sequence
  Sense Oligo
gcaguaagugcugacagcu

SEQ ID NO: 59236 - RNA, 19 nt, Artificial Sequence
  Antisense Oligo
agcugucagcacuuacugc

SEQ ID NO: 59237 - RNA, 19 nt, Artificial Sequence
  Sense Oligo
caguaagugcugacagcug

SEQ ID NO: 59238 - RNA, 19 nt, Artificial Sequence
  Antisense Oligo
cagcugucagcacuuacug

SEQ ID NO: 59239 - RNA, 19 nt, Artificial Sequence
  Sense Oligo
aguaagugcugacagcugg

SEQ ID NO: 59240 - RNA, 19 nt, Artificial Sequence
  Antisense Oligo
ccagcugucagcacuuacu

SEQ ID NO: 59241 - RNA, 19 nt, Artificial Sequence
  Sense Oligo
guaagugcugacagcuggg

SEQ ID NO: 59242 - RNA, 19 nt, Artificial Sequence
  Antisense Oligo
cccagcugucagcacuuac

SEQ ID NO: 59243 - RNA, 19 nt, Artificial Sequence
  Sense Oligo
uaagugcugacagcugggu

SEQ ID NO: 59244 - RNA, 19 nt, Artificial Sequence
  Antisense Oligo
acccagcugucagcacuua

SEQ ID NO: 59245 - RNA, 19 nt, Artificial Sequence
  Sense Oligo
aagugcugacagcuggguu

SEQ ID NO: 59246 - RNA, 19 nt, Artificial Sequence
  Antisense Oligo
aacccagcugucagcacuu

SEQ ID NO: 59247 - RNA, 19 nt, Artificial Sequence
  Sense Oligo
agugcugacagcuggguug

SEQ ID NO: 59248 - RNA, 19 nt, Artificial Sequence
  Antisense Oligo
caacccagcugucagcacu

SEQ ID NO: 59249 - RNA, 19 nt, Artificial Sequence
  Sense Oligo
gugcugacagcuggguugc

SEQ ID NO: 59250 - RNA, 19 nt, Artificial Sequence
  Antisense Oligo
gcaacccagcugucagcac

SEQ ID NO: 59251 - RNA, 19 nt, Artificial Sequence
  Sense Oligo
ugcugacagcuggguugcu

SEQ ID NO: 59252 - RNA, 19 nt, Artificial Sequence
  Antisense Oligo
agcaacccagcugucagca

SEQ ID NO: 59253 - RNA, 19 nt, Artificial Sequence
  Sense Oligo
gcugacagcuggguugcuc

SEQ ID NO: 59254 - RNA, 19 nt, Artificial Sequence
  Antisense Oligo
gagcaacccagcugucagc

SEQ ID NO: 59255 - RNA, 19 nt, Artificial Sequence
  Sense Oligo
cugacagcuggguugcucc

SEQ ID NO: 59256 - RNA, 19 nt, Artificial Sequence
  Antisense Oligo
ggagcaacccagcugucag

SEQ ID NO: 59257 - RNA, 19 nt, Artificial Sequence
  Sense Oligo
cggcgucugcugaaugcuc

SEQ ID NO: 59258 - RNA, 19 nt, Artificial Sequence
  Antisense Oligo
gagcauucagcagacgccg

SEQ ID NO: 59259 - RNA, 19 nt, Artificial Sequence
  Sense Oligo
ggcgucugcugaaugcucc

SEQ ID NO: 59260 - RNA, 19 nt, Artificial Sequence
  Antisense Oligo
ggagcauucagcagacgcc

SEQ ID NO: 59261 - RNA, 19 nt, Artificial Sequence
  Sense Oligo
cugaaugcuccuugccugu

SEQ ID NO: 59262 - RNA, 19 nt, Artificial Sequence
  Antisense Oligo
acaggcaaggagcauucag

SEQ ID NO: 59263 - RNA, 19 nt, Artificial Sequence
  Sense Oligo
ugaaugcuccuugccuguu

SEQ ID NO: 59264 - RNA, 19 nt, Artificial Sequence
  Antisense Oligo
aacaggcaaggagcauuca

SEQ ID NO: 59265 - RNA, 19 nt, Artificial Sequence
  Sense Oligo
gaaugcuccuugccuguug

SEQ ID NO: 59266 - RNA, 19 nt, Artificial Sequence
  Antisense Oligo
caacaggcaaggagcauuc

SEQ ID NO: 59267 - RNA, 19 nt, Artificial Sequence
  Sense Oligo
aaugcuccuugccuguugc

SEQ ID NO: 59268 - RNA, 19 nt, Artificial Sequence
  Antisense Oligo
gcaacaggcaaggagcauu

SEQ ID NO: 59269 - RNA, 19 nt, Artificial Sequence
  Sense Oligo
augcuccuugccuguugcc

SEQ ID NO: 59270 - RNA, 19 nt, Artificial Sequence
  Antisense Oligo
ggcaacaggcaaggagcau

SEQ ID NO: 59271 - RNA, 19 nt, Artificial Sequence
  Sense Oligo
cucguagcggugccagcaa

SEQ ID NO: 59272 - RNA, 19 nt, Artificial Sequence
  Antisense Oligo
uugcuggcaccgcuacgag

SEQ ID NO: 59273 - RNA, 19 nt, Artificial Sequence
  Sense Oligo
ucguagcggugccagcaag

SEQ ID NO: 59274 - RNA, 19 nt, Artificial Sequence
  Antisense Oligo
cuugcuggcaccgcuacga

SEQ ID NO: 59275 - RNA, 19 nt, Artificial Sequence
  Sense Oligo
cguagcggugccagcaaga

SEQ ID NO: 59276 - RNA, 19 nt, Artificial Sequence
  Antisense Oligo
ucuugcuggcaccgcuacg

SEQ ID NO: 59277 - RNA, 19 nt, Artificial Sequence
  Sense Oligo
guagcggugccagcaagag

SEQ ID NO: 59278 - RNA, 19 nt, Artificial Sequence
  Antisense Oligo
cucuugcuggcaccgcuac

SEQ ID NO: 59279 - RNA, 19 nt, Artificial Sequence
  Sense Oligo
uagcggugccagcaagagc

SEQ ID NO: 59280 - RNA, 19 nt, Artificial Sequence
  Antisense Oligo
gcucuugcuggcaccgcua

SEQ ID NO: 59281 - RNA, 19 nt, Artificial Sequence
  Sense Oligo
ggugccagcaagagccuuu

SEQ ID NO: 59282 - RNA, 19 nt, Artificial Sequence
  Antisense Oligo
aaaggcucuugcuggcacc

SEQ ID NO: 59283 - RNA, 19 nt, Artificial Sequence
  Sense Oligo
gugccagcaagagccuuug

SEQ ID NO: 59284 - RNA, 19 nt, Artificial Sequence
  Antisense Oligo
caaaggcucuugcuggcac

SEQ ID NO: 59285 - RNA, 19 nt, Artificial Sequence
  Sense Oligo
ugccagcaagagccuuuga

SEQ ID NO: 59286 - RNA, 19 nt, Artificial Sequence
  Antisense Oligo
ucaaaggcucuugcuggca

SEQ ID NO: 59287 - RNA, 19 nt, Artificial Sequence
  Sense Oligo
gccagcaagagccuuugac

SEQ ID NO: 59288 - RNA, 19 nt, Artificial Sequence
  Antisense Oligo
gucaaaggcucuugcuggc

SEQ ID NO: 59289 - RNA, 19 nt, Artificial Sequence
  Sense Oligo
ccagcaagagccuuugacu

SEQ ID NO: 59290 - RNA, 19 nt, Artificial Sequence
  Antisense Oligo
agucaaaggcucuugcugg

SEQ ID NO: 59291 - RNA, 19 nt, Artificial Sequence
  Sense Oligo
cagcaagagccuuugacug

SEQ ID NO: 59292 - RNA, 19 nt, Artificial Sequence
  Antisense Oligo
cagucaaaggcucuugcug

SEQ ID NO: 59293 - RNA, 19 nt, Artificial Sequence
  Sense Oligo
agcaagagccuuugacuga

SEQ ID NO: 59294 - RNA, 19 nt, Artificial Sequence
  Antisense Oligo
ucagucaaaggcucuugcu

SEQ ID NO: 59295 - RNA, 19 nt, Artificial Sequence
  Sense Oligo
gcaagagccuuugacugag

SEQ ID NO: 59296 - RNA, 19 nt, Artificial Sequence
  Antisense Oligo
cucagucaaaggcucuugc

SEQ ID NO: 59297 - RNA, 19 nt, Artificial Sequence
  Sense Oligo
ccucgagucacuccauccu

SEQ ID NO: 59298 - RNA, 19 nt, Artificial Sequence
  Antisense Oligo
aggauggagugacucgagg

SEQ ID NO: 59299 - RNA, 19 nt, Artificial Sequence
  Sense Oligo
cucgagucacuccauccuc

SEQ ID NO: 59300 - RNA, 19 nt, Artificial Sequence
  Antisense Oligo
gaggauggagugacucgag

SEQ ID NO: 59301 - RNA, 19 nt, Artificial Sequence
  Sense Oligo
acuccauccuccuccuguc

SEQ ID NO: 59302 - RNA, 19 nt, Artificial Sequence
  Antisense Oligo
gacaggaggaggauggagu

SEQ ID NO: 59303 - RNA, 19 nt, Artificial Sequence
  Sense Oligo
cuacagcuggucaugaagu

SEQ ID NO: 59304 - RNA, 19 nt, Artificial Sequence
  Antisense Oligo
acuucaugaccagcuguag

SEQ ID NO: 59305 - RNA, 19 nt, Artificial Sequence
  Sense Oligo
uacagcuggucaugaaguc

SEQ ID NO: 59306 - RNA, 19 nt, Artificial Sequence
  Antisense Oligo
gacuucaugaccagcugua

SEQ ID NO: 59307 - RNA, 19 nt, Artificial Sequence
  Sense Oligo
acagcuggucaugaaguca

SEQ ID NO: 59308 - RNA, 19 nt, Artificial Sequence
  Antisense Oligo
ugacuucaugaccagcugu

SEQ ID NO: 59309 - RNA, 19 nt, Artificial Sequence
  Sense Oligo
cuggucaugaagucagucc

SEQ ID NO: 59310 - RNA, 19 nt, Artificial Sequence
  Antisense Oligo
ggacugacuucaugaccag

SEQ ID NO: 59311 - RNA, 19 nt, Artificial Sequence
  Sense Oligo
uggucaugaagucaguccg

SEQ ID NO: 59312 - RNA, 19 nt, Artificial Sequence
  Antisense Oligo
cggacugacuucaugacca

SEQ ID NO: 59313 - RNA, 19 nt, Artificial Sequence
  Sense Oligo
ggucaugaagucaguccga

SEQ ID NO: 59314 - RNA, 19 nt, Artificial Sequence
  Antisense Oligo
ucggacugacuucaugacc

SEQ ID NO: 59315 - RNA, 19 nt, Artificial Sequence
  Sense Oligo
gucaugaagucaguccgag

SEQ ID NO: 59316 - RNA, 19 nt, Artificial Sequence
  Antisense Oligo
cucggacugacuucaugac

SEQ ID NO: 59317 - RNA, 19 nt, Artificial Sequence
  Sense Oligo
ucaugaagucaguccgagg

SEQ ID NO: 59318 - RNA, 19 nt, Artificial Sequence
  Antisense Oligo
ccucggacugacuucauga

SEQ ID NO: 59319 - RNA, 19 nt, Artificial Sequence
  Sense Oligo
caugaagucaguccgagga

SEQ ID NO: 59320 - RNA, 19 nt, Artificial Sequence
  Antisense Oligo
uccucggacugacuucaug

SEQ ID NO: 59321 - RNA, 19 nt, Artificial Sequence
  Sense Oligo
aagucaguccgaggaauuc

SEQ ID NO: 59322 - RNA, 19 nt, Artificial Sequence
  Antisense Oligo
gaauuccucggacugacuu

SEQ ID NO: 59323 - RNA, 19 nt, Artificial Sequence
  Sense Oligo
agucaguccgaggaauucc

SEQ ID NO: 59324 - RNA, 19 nt, Artificial Sequence
  Antisense Oligo
ggaauuccucggacugacu

SEQ ID NO: 59325 - RNA, 19 nt, Artificial Sequence
  Sense Oligo
gucaguccgaggaauuccu

SEQ ID NO: 59326 - RNA, 19 nt, Artificial Sequence
  Antisense Oligo
aggaauuccucggacugac

SEQ ID NO: 59327 - RNA, 19 nt, Artificial Sequence
  Sense Oligo
uccgaggaauuccugggaa

SEQ ID NO: 59328 - RNA, 19 nt, Artificial Sequence
  Antisense Oligo
uucccaggaauuccucgga

SEQ ID NO: 59329 - RNA, 19 nt, Artificial Sequence
  Sense Oligo
ugggaauccagcaagugca

SEQ ID NO: 59330 - RNA, 19 nt, Artificial Sequence
  Antisense Oligo
ugcacuugcuggauuccca

SEQ ID NO: 59331 - RNA, 19 nt, Artificial Sequence
  Sense Oligo
cagcagaauguaauguacg

SEQ ID NO: 59332 - RNA, 19 nt, Artificial Sequence
  Antisense Oligo
cguacauuacauucugcug

SEQ ID NO: 59333 - RNA, 19 nt, Artificial Sequence
  Sense Oligo
agcagaauguaauguacga

SEQ ID NO: 59334 - RNA, 19 nt, Artificial Sequence
  Antisense Oligo
ucguacauuacauucugcu

SEQ ID NO: 59335 - RNA, 19 nt, Artificial Sequence
  Sense Oligo
gcagaauguaauguacgag

SEQ ID NO: 59336 - RNA, 19 nt, Artificial Sequence
  Antisense Oligo
cucguacauuacauucugc

SEQ ID NO: 59337 - RNA, 19 nt, Artificial Sequence
  Sense Oligo
cagaauguaauguacgagg

SEQ ID NO: 59338 - RNA, 19 nt, Artificial Sequence
  Antisense Oligo
ccucguacauuacauucug

SEQ ID NO: 59339 - RNA, 19 nt, Artificial Sequence
  Sense Oligo
agaauguaauguacgaggu

SEQ ID NO: 59340 - RNA, 19 nt, Artificial Sequence
  Antisense Oligo
accucguacauuacauucu

SEQ ID NO: 59341 - RNA, 19 nt, Artificial Sequence
  Sense Oligo
gaauguaauguacgaggua

SEQ ID NO: 59342 - RNA, 19 nt, Artificial Sequence
  Antisense Oligo
uaccucguacauuacauuc

SEQ ID NO: 59343 - RNA, 19 nt, Artificial Sequence
  Sense Oligo
aauguaauguacgagguag

SEQ ID NO: 59344 - RNA, 19 nt, Artificial Sequence
  Antisense Oligo
cuaccucguacauuacauu

SEQ ID NO: 59345 - RNA, 19 nt, Artificial Sequence
  Sense Oligo
auguaauguacgagguaga

SEQ ID NO: 59346 - RNA, 19 nt, Artificial Sequence
  Antisense Oligo
ucuaccucguacauuacau

SEQ ID NO: 59347 - RNA, 19 nt, Artificial Sequence
  Sense Oligo
uguaauguacgagguagag

SEQ ID NO: 59348 - RNA, 19 nt, Artificial Sequence
  Antisense Oligo
cucuaccucguacauuaca

SEQ ID NO: 59349 - RNA, 19 nt, Artificial Sequence
  Sense Oligo
aacuaucacauauauaccc

SEQ ID NO: 59350 - RNA, 19 nt, Artificial Sequence
  Antisense Oligo
ggguauauaugugauaguu

SEQ ID NO: 59351 - RNA, 19 nt, Artificial Sequence
  Sense Oligo
acuaucacauauauaccca

SEQ ID NO: 59352 - RNA, 19 nt, Artificial Sequence
  Antisense Oligo
uggguauauaugugauagu

SEQ ID NO: 59353 - RNA, 19 nt, Artificial Sequence
  Sense Oligo
cuaucacauauauacccau

SEQ ID NO: 59354 - RNA, 19 nt, Artificial Sequence
  Antisense Oligo
auggguauauaugugauag

SEQ ID NO: 59355 - RNA, 19 nt, Artificial Sequence
  Sense Oligo
uaauuauucaucuagcagc

SEQ ID NO: 59356 - RNA, 19 nt, Artificial Sequence
  Antisense Oligo
gcugcuagaugaauaauua

SEQ ID NO: 59357 - RNA, 19 nt, Artificial Sequence
  Sense Oligo
uucaucuagcagccagaau

SEQ ID NO: 59358 - RNA, 19 nt, Artificial Sequence
  Antisense Oligo
auucuggcugcuagaugaa

SEQ ID NO: 59359 - RNA, 19 nt, Artificial Sequence
  Sense Oligo
ucaucuagcagccagaaug

SEQ ID NO: 59360 - RNA, 19 nt, Artificial Sequence
  Antisense Oligo
cauucuggcugcuagauga

SEQ ID NO: 59361 - RNA, 19 nt, Artificial Sequence
  Sense Oligo
uagcagccagaauguuagu

SEQ ID NO: 59362 - RNA, 19 nt, Artificial Sequence
  Antisense Oligo
acuaacauucuggcugcua

SEQ ID NO: 59363 - RNA, 19 nt, Artificial Sequence
  Sense Oligo
agcagccagaauguuagua

SEQ ID NO: 59364 - RNA, 19 nt, Artificial Sequence
  Antisense Oligo
uacuaacauucuggcugcu

SEQ ID NO: 59365 - RNA, 19 nt, Artificial Sequence
  Sense Oligo
gcagccagaauguuaguaa

SEQ ID NO: 59366 - RNA, 19 nt, Artificial Sequence
  Antisense Oligo
uuacuaacauucuggcugc

SEQ ID NO: 59367 - RNA, 19 nt, Artificial Sequence
  Sense Oligo
cagccagaauguuaguaag

SEQ ID NO: 59368 - RNA, 19 nt, Artificial Sequence
  Antisense Oligo
cuuacuaacauucuggcug

SEQ ID NO: 59369 - RNA, 19 nt, Artificial Sequence
  Sense Oligo
agccagaauguuaguaaga

SEQ ID NO: 59370 - RNA, 19 nt, Artificial Sequence
  Antisense Oligo
ucuuacuaacauucuggcu

SEQ ID NO: 59371 - RNA, 19 nt, Artificial Sequence
  Sense Oligo
gccagaauguuaguaagag

SEQ ID NO: 59372 - RNA, 19 nt, Artificial Sequence
  Antisense Oligo
cucuuacuaacauucuggc

SEQ ID NO: 59373 - RNA, 19 nt, Artificial Sequence
  Sense Oligo
auauagguuucugaaucuc

SEQ ID NO: 59374 - RNA, 19 nt, Artificial Sequence
  Antisense Oligo
gagauucagaaaccuauau

SEQ ID NO: 59375 - RNA, 19 nt, Artificial Sequence
  Sense Oligo
uauagguuucugaaucuca

SEQ ID NO: 59376 - RNA, 19 nt, Artificial Sequence
  Antisense Oligo
ugagauucagaaaccuaua

SEQ ID NO: 59377 - RNA, 19 nt, Artificial Sequence
  Sense Oligo
auagguuucugaaucucau

SEQ ID NO: 59378 - RNA, 19 nt, Artificial Sequence
  Antisense Oligo
augagauucagaaaccuau

SEQ ID NO: 59379 - RNA, 19 nt, Artificial Sequence
  Sense Oligo
uagguuucugaaucucauu

SEQ ID NO: 59380 - RNA, 19 nt, Artificial Sequence
  Antisense Oligo
aaugagauucagaaaccua

SEQ ID NO: 59381 - RNA, 19 nt, Artificial Sequence
  Sense Oligo
uagaagaucaaagggaaua

SEQ ID NO: 59382 - RNA, 19 nt, Artificial Sequence
  Antisense Oligo
uauucccuuugaucuucua

SEQ ID NO: 59383 - RNA, 19 nt, Artificial Sequence
  Sense Oligo
agaagaucaaagggaauac

SEQ ID NO: 59384 - RNA, 19 nt, Artificial Sequence
  Antisense Oligo
guauucccuuugaucuucu

SEQ ID NO: 59385 - RNA, 19 nt, Artificial Sequence
  Sense Oligo
gaagaucaaagggaauacc

SEQ ID NO: 59386 - RNA, 19 nt, Artificial Sequence
  Antisense Oligo
gguauucccuuugaucuuc

SEQ ID NO: 59387 - RNA, 19 nt, Artificial Sequence
  Sense Oligo
aagaucaaagggaauaccu

SEQ ID NO: 59388 - RNA, 19 nt, Artificial Sequence
  Antisense Oligo
agguauucccuuugaucuu

SEQ ID NO: 59389 - RNA, 19 nt, Artificial Sequence
  Sense Oligo
agaucaaagggaauaccug

SEQ ID NO: 59390 - RNA, 19 nt, Artificial Sequence
  Antisense Oligo
cagguauucccuuugaucu

SEQ ID NO: 59391 - RNA, 19 nt, Artificial Sequence
  Sense Oligo
gaucaaagggaauaccuga

SEQ ID NO: 59392 - RNA, 19 nt, Artificial Sequence
  Antisense Oligo
ucagguauucccuuugauc

SEQ ID NO: 59393 - RNA, 19 nt, Artificial Sequence
  Sense Oligo
ucaaagggaauaccugauu

SEQ ID NO: 59394 - RNA, 19 nt, Artificial Sequence
  Antisense Oligo
aaucagguauucccuuuga

SEQ ID NO: 59395 - RNA, 19 nt, Artificial Sequence
  Sense Oligo
caaagggaauaccugauua

SEQ ID NO: 59396 - RNA, 19 nt, Artificial Sequence
  Antisense Oligo
uaaucagguauucccuuug

SEQ ID NO: 59397 - RNA, 19 nt, Artificial Sequence
  Sense Oligo
aagggaauaccugauuaca

SEQ ID NO: 59398 - RNA, 19 nt, Artificial Sequence
  Antisense Oligo
uguaaucagguauucccuu

SEQ ID NO: 59399 - RNA, 19 nt, Artificial Sequence
  Sense Oligo
gaauaccugauuacaugcu

SEQ ID NO: 59400 - RNA, 19 nt, Artificial Sequence
  Antisense Oligo
agcauguaaucagguauuc

SEQ ID NO: 59401 - RNA, 19 nt, Artificial Sequence
  Sense Oligo
aauaccugauuacaugcuc

SEQ ID NO: 59402 - RNA, 19 nt, Artificial Sequence
  Antisense Oligo
gagcauguaaucagguauu

SEQ ID NO: 59403 - RNA, 19 nt, Artificial Sequence
  Sense Oligo
auaccugauuacaugcuca

SEQ ID NO: 59404 - RNA, 19 nt, Artificial Sequence
  Antisense Oligo
ugagcauguaaucagguau

SEQ ID NO: 59405 - RNA, 19 nt, Artificial Sequence
  Sense Oligo
gcccuaauaugcagacacc

SEQ ID NO: 59406 - RNA, 19 nt, Artificial Sequence
  Antisense Oligo
ggugucugcauauuagggc

SEQ ID NO: 59407 - RNA, 19 nt, Artificial Sequence
  Sense Oligo
cccuaauaugcagacaccc

SEQ ID NO: 59408 - RNA, 19 nt, Artificial Sequence
  Antisense Oligo
gggugucugcauauuaggg

SEQ ID NO: 59409 - RNA, 19 nt, Artificial Sequence
  Sense Oligo
ccuaauaugcagacaccca

SEQ ID NO: 59410 - RNA, 19 nt, Artificial Sequence
  Antisense Oligo
ugggugucugcauauuagg

SEQ ID NO: 59411 - RNA, 19 nt, Artificial Sequence
  Sense Oligo
cuaauaugcagacacccac

SEQ ID NO: 59412 - RNA, 19 nt, Artificial Sequence
  Antisense Oligo
gugggugucugcauauuag

SEQ ID NO: 59413 - RNA, 19 nt, Artificial Sequence
  Sense Oligo
uaauaugcagacacccacu

SEQ ID NO: 59414 - RNA, 19 nt, Artificial Sequence
  Antisense Oligo
agugggugucugcauauua

SEQ ID NO: 59415 - RNA, 19 nt, Artificial Sequence
  Sense Oligo
acccacugguggaguuacu

SEQ ID NO: 59416 - RNA, 19 nt, Artificial Sequence
  Antisense Oligo
aguaacuccaccagugggu

SEQ ID NO: 59417 - RNA, 19 nt, Artificial Sequence
  Sense Oligo
acugguggaguuacugggu

SEQ ID NO: 59418 - RNA, 19 nt, Artificial Sequence
  Antisense Oligo
acccaguaacuccaccagu

SEQ ID NO: 59419 - RNA, 19 nt, Artificial Sequence
  Sense Oligo
cugguggaguuacugggug

SEQ ID NO: 59420 - RNA, 19 nt, Artificial Sequence
  Antisense Oligo
cacccaguaacuccaccag

SEQ ID NO: 59421 - RNA, 19 nt, Artificial Sequence
  Sense Oligo
ugguggaguuacugggugu

SEQ ID NO: 59422 - RNA, 19 nt, Artificial Sequence
  Antisense Oligo
acacccaguaacuccacca

SEQ ID NO: 59423 - RNA, 19 nt, Artificial Sequence
  Sense Oligo
gguggaguuacuggguguu

SEQ ID NO: 59424 - RNA, 19 nt, Artificial Sequence
  Antisense Oligo
aacacccaguaacuccacc

SEQ ID NO: 59425 - RNA, 19 nt, Artificial Sequence
  Sense Oligo
guggaguuacuggguguua

SEQ ID NO: 59426 - RNA, 19 nt, Artificial Sequence
  Antisense Oligo
uaacacccaguaacuccac

SEQ ID NO: 59427 - RNA, 19 nt, Artificial Sequence
  Sense Oligo
uguagcaauaccucacuuc

SEQ ID NO: 59428 - RNA, 19 nt, Artificial Sequence
  Antisense Oligo
gaagugagguauugcuaca

SEQ ID NO: 59429 - RNA, 19 nt, Artificial Sequence
  Sense Oligo
caauaccucacuuccagaa

SEQ ID NO: 59430 - RNA, 19 nt, Artificial Sequence
  Antisense Oligo
uucuggaagugagguauug

SEQ ID NO: 59431 - RNA, 19 nt, Artificial Sequence
  Sense Oligo
aauaccucacuuccagaau

SEQ ID NO: 59432 - RNA, 19 nt, Artificial Sequence
  Antisense Oligo
auucuggaagugagguauu

SEQ ID NO: 59433 - RNA, 19 nt, Artificial Sequence
  Sense Oligo
auaccucacuuccagaauu

SEQ ID NO: 59434 - RNA, 19 nt, Artificial Sequence
  Antisense Oligo
aauucuggaagugagguau

SEQ ID NO: 59435 - RNA, 19 nt, Artificial Sequence
  Sense Oligo
uuuucauuuucuccaucca

SEQ ID NO: 59436 - RNA, 19 nt, Artificial Sequence
  Antisense Oligo
uggauggagaaaaugaaaa

SEQ ID NO: 59437 - RNA, 19 nt, Artificial Sequence
  Sense Oligo
ucccaccaugaauaaucuc

SEQ ID NO: 59438 - RNA, 19 nt, Artificial Sequence
  Antisense Oligo
gagauuauucaugguggga

SEQ ID NO: 59439 - RNA, 19 nt, Artificial Sequence
  Sense Oligo
cccaccaugaauaaucuca

SEQ ID NO: 59440 - RNA, 19 nt, Artificial Sequence
  Antisense Oligo
ugagauuauucaugguggg

SEQ ID NO: 59441 - RNA, 19 nt, Artificial Sequence
  Sense Oligo
auaaucucaucagccaaga

SEQ ID NO: 59442 - RNA, 19 nt, Artificial Sequence
  Antisense Oligo
ucuuggcugaugagauuau

SEQ ID NO: 59443 - RNA, 19 nt, Artificial Sequence
  Sense Oligo
ucucaucagccaagauaag

SEQ ID NO: 59444 - RNA, 19 nt, Artificial Sequence
  Antisense Oligo
cuuaucuuggcugaugaga

SEQ ID NO: 59445 - RNA, 19 nt, Artificial Sequence
  Sense Oligo
cucaucagccaagauaagc

SEQ ID NO: 59446 - RNA, 19 nt, Artificial Sequence
  Antisense Oligo
gcuuaucuuggcugaugag

SEQ ID NO: 59447 - RNA, 19 nt, Artificial Sequence
  Sense Oligo
ucaucagccaagauaagcg

SEQ ID NO: 59448 - RNA, 19 nt, Artificial Sequence
  Antisense Oligo
cgcuuaucuuggcugauga

SEQ ID NO: 59449 - RNA, 19 nt, Artificial Sequence
  Sense Oligo
caucagccaagauaagcgu

SEQ ID NO: 59450 - RNA, 19 nt, Artificial Sequence
  Antisense Oligo
acgcuuaucuuggcugaug

SEQ ID NO: 59451 - RNA, 19 nt, Artificial Sequence
  Sense Oligo
aucagccaagauaagcgua

SEQ ID NO: 59452 - RNA, 19 nt, Artificial Sequence
  Antisense Oligo
uacgcuuaucuuggcugau

SEQ ID NO: 59453 - RNA, 19 nt, Artificial Sequence
  Sense Oligo
ucagccaagauaagcguau

SEQ ID NO: 59454 - RNA, 19 nt, Artificial Sequence
  Antisense Oligo
auacgcuuaucuuggcuga

SEQ ID NO: 59455 - RNA, 19 nt, Artificial Sequence
  Sense Oligo
auaagcguaucagcucuaa

SEQ ID NO: 59456 - RNA, 19 nt, Artificial Sequence
  Antisense Oligo
uuagagcugauacgcuuau

SEQ ID NO: 59457 - RNA, 19 nt, Artificial Sequence
  Sense Oligo
uaagcguaucagcucuaac

SEQ ID NO: 59458 - RNA, 19 nt, Artificial Sequence
  Antisense Oligo
guuagagcugauacgcuua

SEQ ID NO: 59459 - RNA, 19 nt, Artificial Sequence
  Sense Oligo
aagcguaucagcucuaacc

SEQ ID NO: 59460 - RNA, 19 nt, Artificial Sequence
  Antisense Oligo
gguuagagcugauacgcuu

SEQ ID NO: 59461 - RNA, 19 nt, Artificial Sequence
  Sense Oligo
agcguaucagcucuaaccc

SEQ ID NO: 59462 - RNA, 19 nt, Artificial Sequence
  Antisense Oligo
ggguuagagcugauacgcu

SEQ ID NO: 59463 - RNA, 19 nt, Artificial Sequence
  Sense Oligo
aucagcucuaacccugugg

SEQ ID NO: 59464 - RNA, 19 nt, Artificial Sequence
  Antisense Oligo
ccacaggguuagagcugau

SEQ ID NO: 59465 - RNA, 19 nt, Artificial Sequence
  Sense Oligo
ucagcucuaacccuguggc

SEQ ID NO: 59466 - RNA, 19 nt, Artificial Sequence
  Antisense Oligo
gccacaggguuagagcuga

SEQ ID NO: 59467 - RNA, 19 nt, Artificial Sequence
  Sense Oligo
agcucuaacccuguggcca

SEQ ID NO: 59468 - RNA, 19 nt, Artificial Sequence
  Antisense Oligo
uggccacaggguuagagcu

SEQ ID NO: 59469 - RNA, 19 nt, Artificial Sequence
  Sense Oligo
gcucuaacccuguggccaa

SEQ ID NO: 59470 - RNA, 19 nt, Artificial Sequence
  Antisense Oligo
uuggccacaggguuagagc

SEQ ID NO: 59471 - RNA, 19 nt, Artificial Sequence
  Sense Oligo
cucuaacccuguggccaaa

SEQ ID NO: 59472 - RNA, 19 nt, Artificial Sequence
  Antisense Oligo
uuuggccacaggguuagag

SEQ ID NO: 59473 - RNA, 19 nt, Artificial Sequence
  Sense Oligo
ucuaacccuguggccaaaa

SEQ ID NO: 59474 - RNA, 19 nt, Artificial Sequence
  Antisense Oligo
uuuuggccacaggguuaga

SEQ ID NO: 59475 - RNA, 19 nt, Artificial Sequence
  Sense Oligo
cuaacccuguggccaaaau

SEQ ID NO: 59476 - RNA, 19 nt, Artificial Sequence
  Antisense Oligo
auuuuggccacaggguuag

SEQ ID NO: 59477 - RNA, 19 nt, Artificial Sequence
  Sense Oligo
uaacccuguggccaaaaua

SEQ ID NO: 59478 - RNA, 19 nt, Artificial Sequence
  Antisense Oligo
uauuuuggccacaggguua

SEQ ID NO: 59479 - RNA, 19 nt, Artificial Sequence
  Sense Oligo
aacccuguggccaaaauaa

SEQ ID NO: 59480 - RNA, 19 nt, Artificial Sequence
  Antisense Oligo
uuauuuuggccacaggguu

SEQ ID NO: 59481 - RNA, 19 nt, Artificial Sequence
  Sense Oligo
cuguggccaaaauaauaua

SEQ ID NO: 59482 - RNA, 19 nt, Artificial Sequence
  Antisense Oligo
uauauuauuuuggccacag

SEQ ID NO: 59483 - RNA, 19 nt, Artificial Sequence
  Sense Oligo
guggccaaaauaauauaug

SEQ ID NO: 59484 - RNA, 19 nt, Artificial Sequence
  Antisense Oligo
cauauauuauuuuggccac

SEQ ID NO: 59485 - RNA, 19 nt, Artificial Sequence
  Sense Oligo
uggccaaaauaauauaugg

SEQ ID NO: 59486 - RNA, 19 nt, Artificial Sequence
  Antisense Oligo
ccauauauuauuuuggcca

SEQ ID NO: 59487 - RNA, 19 nt, Artificial Sequence
  Sense Oligo
ggccaaaauaauauauggu

SEQ ID NO: 59488 - RNA, 19 nt, Artificial Sequence
  Antisense Oligo
accauauauuauuuuggcc

SEQ ID NO: 59489 - RNA, 19 nt, Artificial Sequence
  Sense Oligo
gccaaaauaauauauggug

SEQ ID NO: 59490 - RNA, 19 nt, Artificial Sequence
  Antisense Oligo
caccauauauuauuuuggc

SEQ ID NO: 59491 - RNA, 19 nt, Artificial Sequence
  Sense Oligo
aaauaauauauggugaccc

SEQ ID NO: 59492 - RNA, 19 nt, Artificial Sequence
  Antisense Oligo
gggucaccauauauuauuu

SEQ ID NO: 59493 - RNA, 19 nt, Artificial Sequence
  Sense Oligo
aauaauauauggugaccca

SEQ ID NO: 59494 - RNA, 19 nt, Artificial Sequence
  Antisense Oligo
ugggucaccauauauuauu

SEQ ID NO: 59495 - RNA, 19 nt, Artificial Sequence
  Sense Oligo
auaauauauggugacccag

SEQ ID NO: 59496 - RNA, 19 nt, Artificial Sequence
  Antisense Oligo
cugggucaccauauauuau

SEQ ID NO: 59497 - RNA, 19 nt, Artificial Sequence
  Sense Oligo
uaauauauggugacccagu

SEQ ID NO: 59498 - RNA, 19 nt, Artificial Sequence
  Antisense Oligo
acugggucaccauauauua

SEQ ID NO: 59499 - RNA, 19 nt, Artificial Sequence
  Sense Oligo
aauauauggugacccagug

SEQ ID NO: 59500 - RNA, 19 nt, Artificial Sequence
  Antisense Oligo
cacugggucaccauauauu

SEQ ID NO: 59501 - RNA, 19 nt, Artificial Sequence
  Sense Oligo
aaagugugguccauugcuc

SEQ ID NO: 59502 - RNA, 19 nt, Artificial Sequence
  Antisense Oligo
gagcaauggaccacacuuu

SEQ ID NO: 59503 - RNA, 19 nt, Artificial Sequence
  Sense Oligo
aagugugguccauugcucu

SEQ ID NO: 59504 - RNA, 19 nt, Artificial Sequence
  Antisense Oligo
agagcaauggaccacacuu

SEQ ID NO: 59505 - RNA, 19 nt, Artificial Sequence
  Sense Oligo
agugugguccauugcucua

SEQ ID NO: 59506 - RNA, 19 nt, Artificial Sequence
  Antisense Oligo
uagagcaauggaccacacu

SEQ ID NO: 59507 - RNA, 19 nt, Artificial Sequence
  Sense Oligo
gugugguccauugcucuaa

SEQ ID NO: 59508 - RNA, 19 nt, Artificial Sequence
  Antisense Oligo
uuagagcaauggaccacac

SEQ ID NO: 59509 - RNA, 19 nt, Artificial Sequence
  Sense Oligo
ugugguccauugcucuaag

SEQ ID NO: 59510 - RNA, 19 nt, Artificial Sequence
  Antisense Oligo
cuuagagcaauggaccaca

SEQ ID NO: 59511 - RNA, 19 nt, Artificial Sequence
  Sense Oligo
gugguccauugcucuaaga

SEQ ID NO: 59512 - RNA, 19 nt, Artificial Sequence
  Antisense Oligo
ucuuagagcaauggaccac

SEQ ID NO: 59513 - RNA, 19 nt, Artificial Sequence
  Sense Oligo
uccauugcucuaagauuug

SEQ ID NO: 59514 - RNA, 19 nt, Artificial Sequence
  Antisense Oligo
caaaucuuagagcaaugga

SEQ ID NO: 59515 - RNA, 19 nt, Artificial Sequence
  Sense Oligo
ccauugcucuaagauuugg

SEQ ID NO: 59516 - RNA, 19 nt, Artificial Sequence
  Antisense Oligo
ccaaaucuuagagcaaugg

SEQ ID NO: 59517 - RNA, 19 nt, Artificial Sequence
  Sense Oligo
cauugcucuaagauuugga

SEQ ID NO: 59518 - RNA, 19 nt, Artificial Sequence
  Antisense Oligo
uccaaaucuuagagcaaug

SEQ ID NO: 59519 - RNA, 19 nt, Artificial Sequence
  Sense Oligo
auugcucuaagauuuggag

SEQ ID NO: 59520 - RNA, 19 nt, Artificial Sequence
  Antisense Oligo
cuccaaaucuuagagcaau

SEQ ID NO: 59521 - RNA, 19 nt, Artificial Sequence
  Sense Oligo
cucuaagauuuggagcugc

SEQ ID NO: 59522 - RNA, 19 nt, Artificial Sequence
  Antisense Oligo
gcagcuccaaaucuuagag

SEQ ID NO: 59523 - RNA, 19 nt, Artificial Sequence
  Sense Oligo
ucuaagauuuggagcugca

SEQ ID NO: 59524 - RNA, 19 nt, Artificial Sequence
  Antisense Oligo
ugcagcuccaaaucuuaga

SEQ ID NO: 59525 - RNA, 19 nt, Artificial Sequence
  Sense Oligo
agauuuggagcugcaggaa

SEQ ID NO: 59526 - RNA, 19 nt, Artificial Sequence
  Antisense Oligo
uuccugcagcuccaaaucu

SEQ ID NO: 59527 - RNA, 19 nt, Artificial Sequence
  Sense Oligo
aagaauuacaguugaguac

SEQ ID NO: 59528 - RNA, 19 nt, Artificial Sequence
  Antisense Oligo
guacucaacuguaauucuu

SEQ ID NO: 59529 - RNA, 19 nt, Artificial Sequence
  Sense Oligo
agaauuacaguugaguacc

SEQ ID NO: 59530 - RNA, 19 nt, Artificial Sequence
  Antisense Oligo
gguacucaacuguaauucu

SEQ ID NO: 59531 - RNA, 19 nt, Artificial Sequence
  Sense Oligo
gaauuacaguugaguaccu

SEQ ID NO: 59532 - RNA, 19 nt, Artificial Sequence
  Antisense Oligo
agguacucaacuguaauuc

SEQ ID NO: 59533 - RNA, 19 nt, Artificial Sequence
  Sense Oligo
caguugaguaccuccagca

SEQ ID NO: 59534 - RNA, 19 nt, Artificial Sequence
  Antisense Oligo
ugcuggagguacucaacug

SEQ ID NO: 59535 - RNA, 19 nt, Artificial Sequence
  Sense Oligo
aguugaguaccuccagcac

SEQ ID NO: 59536 - RNA, 19 nt, Artificial Sequence
  Antisense Oligo
gugcuggagguacucaacu

SEQ ID NO: 59537 - RNA, 19 nt, Artificial Sequence
  Sense Oligo
aguaccuccagcacauugu

SEQ ID NO: 59538 - RNA, 19 nt, Artificial Sequence
  Antisense Oligo
acaaugugcuggagguacu

SEQ ID NO: 59539 - RNA, 19 nt, Artificial Sequence
  Sense Oligo
guaccuccagcacauugug

SEQ ID NO: 59540 - RNA, 19 nt, Artificial Sequence
  Antisense Oligo
cacaaugugcuggagguac

SEQ ID NO: 59541 - RNA, 19 nt, Artificial Sequence
  Sense Oligo
uaccuccagcacauugugg

SEQ ID NO: 59542 - RNA, 19 nt, Artificial Sequence
  Antisense Oligo
ccacaaugugcuggaggua

SEQ ID NO: 59543 - RNA, 19 nt, Artificial Sequence
  Sense Oligo
cccauccucuggcauuucc

SEQ ID NO: 59544 - RNA, 19 nt, Artificial Sequence
  Antisense Oligo
ggaaaugccagaggauggg

SEQ ID NO: 59545 - RNA, 19 nt, Artificial Sequence
  Sense Oligo
uuccugcagaagguauguc

SEQ ID NO: 59546 - RNA, 19 nt, Artificial Sequence
  Antisense Oligo
gacauaccuucugcaggaa

SEQ ID NO: 59547 - RNA, 19 nt, Artificial Sequence
  Sense Oligo
uccugcagaagguaugucu

SEQ ID NO: 59548 - RNA, 19 nt, Artificial Sequence
  Antisense Oligo
agacauaccuucugcagga

SEQ ID NO: 59549 - RNA, 19 nt, Artificial Sequence
  Sense Oligo
agaagguaugucuggcuua

SEQ ID NO: 59550 - RNA, 19 nt, Artificial Sequence
  Antisense Oligo
uaagccagacauaccuucu

SEQ ID NO: 59551 - RNA, 19 nt, Artificial Sequence
  Sense Oligo
gaagguaugucuggcuuac

SEQ ID NO: 59552 - RNA, 19 nt, Artificial Sequence
  Antisense Oligo
guaagccagacauaccuuc

SEQ ID NO: 59553 - RNA, 19 nt, Artificial Sequence
  Sense Oligo
aagguaugucuggcuuacu

SEQ ID NO: 59554 - RNA, 19 nt, Artificial Sequence
  Antisense Oligo
aguaagccagacauaccuu

SEQ ID NO: 59555 - RNA, 19 nt, Artificial Sequence
  Sense Oligo
ugucuggcuuacuguggcu

SEQ ID NO: 59556 - RNA, 19 nt, Artificial Sequence
  Antisense Oligo
agccacaguaagccagaca

SEQ ID NO: 59557 - RNA, 19 nt, Artificial Sequence
  Sense Oligo
gucuggcuuacuguggcuc

SEQ ID NO: 59558 - RNA, 19 nt, Artificial Sequence
  Antisense Oligo
gagccacaguaagccagac

SEQ ID NO: 59559 - RNA, 19 nt, Artificial Sequence
  Sense Oligo
ggcuuacuguggcucccuc

SEQ ID NO: 59560 - RNA, 19 nt, Artificial Sequence
  Antisense Oligo
gagggagccacaguaagcc

SEQ ID NO: 59561 - RNA, 19 nt, Artificial Sequence
  Sense Oligo
gcuuacuguggcucccucc

SEQ ID NO: 59562 - RNA, 19 nt, Artificial Sequence
  Antisense Oligo
ggagggagccacaguaagc

SEQ ID NO: 59563 - RNA, 19 nt, Artificial Sequence
  Sense Oligo
cuuacuguggcucccuccc

SEQ ID NO: 59564 - RNA, 19 nt, Artificial Sequence
  Antisense Oligo
gggagggagccacaguaag

SEQ ID NO: 59565 - RNA, 19 nt, Artificial Sequence
  Sense Oligo
acuguggcucccucccucu

SEQ ID NO: 59566 - RNA, 19 nt, Artificial Sequence
  Antisense Oligo
agagggagggagccacagu

SEQ ID NO: 59567 - RNA, 19 nt, Artificial Sequence
  Sense Oligo
uguggcucccucccucuuu

SEQ ID NO: 59568 - RNA, 19 nt, Artificial Sequence
  Antisense Oligo
aaagagggagggagccaca

SEQ ID NO: 59569 - RNA, 19 nt, Artificial Sequence
  Sense Oligo
guggcucccucccucuuuc

SEQ ID NO: 59570 - RNA, 19 nt, Artificial Sequence
  Antisense Oligo
gaaagagggagggagccac

SEQ ID NO: 59571 - RNA, 19 nt, Artificial Sequence
  Sense Oligo
gcucccucccucuuucggu

SEQ ID NO: 59572 - RNA, 19 nt, Artificial Sequence
  Antisense Oligo
accgaaagagggagggagc

SEQ ID NO: 59573 - RNA, 19 nt, Artificial Sequence
  Sense Oligo
cucccucccucuuucggug

SEQ ID NO: 59574 - RNA, 19 nt, Artificial Sequence
  Antisense Oligo
caccgaaagagggagggag

SEQ ID NO: 59575 - RNA, 19 nt, Artificial Sequence
  Sense Oligo
ucccucccucuuucggugc

SEQ ID NO: 59576 - RNA, 19 nt, Artificial Sequence
  Antisense Oligo
gcaccgaaagagggaggga

SEQ ID NO: 59577 - RNA, 19 nt, Artificial Sequence
  Sense Oligo
cccucccucuuucggugca

SEQ ID NO: 59578 - RNA, 19 nt, Artificial Sequence
  Antisense Oligo
ugcaccgaaagagggaggg

SEQ ID NO: 59579 - RNA, 19 nt, Artificial Sequence
  Sense Oligo
ucuuucggugcagaguucc

SEQ ID NO: 59580 - RNA, 19 nt, Artificial Sequence
  Antisense Oligo
ggaacucugcaccgaaaga

SEQ ID NO: 59581 - RNA, 19 nt, Artificial Sequence
  Sense Oligo
ccugaaggcccugggcuuu

SEQ ID NO: 59582 - RNA, 19 nt, Artificial Sequence
  Antisense Oligo
aaagcccagggccuucagg

SEQ ID NO: 59583 - RNA, 19 nt, Artificial Sequence
  Sense Oligo
cugaaggcccugggcuuuu

SEQ ID NO: 59584 - RNA, 19 nt, Artificial Sequence
  Antisense Oligo
aaaagcccagggccuucag

SEQ ID NO: 59585 - RNA, 19 nt, Artificial Sequence
  Sense Oligo
ugaaggcccugggcuuuua

SEQ ID NO: 59586 - RNA, 19 nt, Artificial Sequence
  Antisense Oligo
uaaaagcccagggccuuca

SEQ ID NO: 59587 - RNA, 19 nt, Artificial Sequence
  Sense Oligo
gaaggcccugggcuuuuac

SEQ ID NO: 59588 - RNA, 19 nt, Artificial Sequence
  Antisense Oligo
guaaaagcccagggccuuc

SEQ ID NO: 59589 - RNA, 19 nt, Artificial Sequence
  Sense Oligo
aaggcccugggcuuuuacg

SEQ ID NO: 59590 - RNA, 19 nt, Artificial Sequence
  Antisense Oligo
cguaaaagcccagggccuu

SEQ ID NO: 59591 - RNA, 19 nt, Artificial Sequence
  Sense Oligo
ggcccugggcuuuuacgua

SEQ ID NO: 59592 - RNA, 19 nt, Artificial Sequence
  Antisense Oligo
uacguaaaagcccagggcc

SEQ ID NO: 59593 - RNA, 19 nt, Artificial Sequence
  Sense Oligo
gcccugggcuuuuacguag

SEQ ID NO: 59594 - RNA, 19 nt, Artificial Sequence
  Antisense Oligo
cuacguaaaagcccagggc

SEQ ID NO: 59595 - RNA, 19 nt, Artificial Sequence
  Sense Oligo
cccugggcuuuuacguagu

SEQ ID NO: 59596 - RNA, 19 nt, Artificial Sequence
  Antisense Oligo
acuacguaaaagcccaggg

SEQ ID NO: 59597 - RNA, 19 nt, Artificial Sequence
  Sense Oligo
ccugggcuuuuacguagua

SEQ ID NO: 59598 - RNA, 19 nt, Artificial Sequence
  Antisense Oligo
uacuacguaaaagcccagg

SEQ ID NO: 59599 - RNA, 19 nt, Artificial Sequence
  Sense Oligo
cugggcuuuuacguaguau

SEQ ID NO: 59600 - RNA, 19 nt, Artificial Sequence
  Antisense Oligo
auacuacguaaaagcccag

SEQ ID NO: 59601 - RNA, 19 nt, Artificial Sequence
  Sense Oligo
ugggcuuuuacguaguaua

SEQ ID NO: 59602 - RNA, 19 nt, Artificial Sequence
  Antisense Oligo
uauacuacguaaaagccca

SEQ ID NO: 59603 - RNA, 19 nt, Artificial Sequence
  Sense Oligo
gggcuuuuacguaguauaa

SEQ ID NO: 59604 - RNA, 19 nt, Artificial Sequence
  Antisense Oligo
uuauacuacguaaaagccc

SEQ ID NO: 59605 - RNA, 19 nt, Artificial Sequence
  Sense Oligo
ggcuuuuacguaguauaau

SEQ ID NO: 59606 - RNA, 19 nt, Artificial Sequence
  Antisense Oligo
auuauacuacguaaaagcc

SEQ ID NO: 59607 - RNA, 19 nt, Artificial Sequence
  Sense Oligo
gcuuuuacguaguauaauc

SEQ ID NO: 59608 - RNA, 19 nt, Artificial Sequence
  Antisense Oligo
gauuauacuacguaaaagc

SEQ ID NO: 59609 - RNA, 19 nt, Artificial Sequence
  Sense Oligo
cagacuauuccagugcuuu

SEQ ID NO: 59610 - RNA, 19 nt, Artificial Sequence
  Antisense Oligo
aaagcacuggaauagucug

SEQ ID NO: 59611 - RNA, 19 nt, Artificial Sequence
  Sense Oligo
agugcuuugguuuugaaua

SEQ ID NO: 59612 - RNA, 19 nt, Artificial Sequence
  Antisense Oligo
uauucaaaaccaaagcacu

SEQ ID NO: 59613 - RNA, 19 nt, Artificial Sequence
  Sense Oligo
uugguuuugaauaggaugu

SEQ ID NO: 59614 - RNA, 19 nt, Artificial Sequence
  Antisense Oligo
acauccuauucaaaaccaa

SEQ ID NO: 59615 - RNA, 19 nt, Artificial Sequence
  Sense Oligo
ugguuuugaauaggaugua

SEQ ID NO: 59616 - RNA, 19 nt, Artificial Sequence
  Antisense Oligo
uacauccuauucaaaacca

SEQ ID NO: 59617 - RNA, 19 nt, Artificial Sequence
  Sense Oligo
gguuuugaauaggauguag

SEQ ID NO: 59618 - RNA, 19 nt, Artificial Sequence
  Antisense Oligo
cuacauccuauucaaaacc

SEQ ID NO: 59619 - RNA, 19 nt, Artificial Sequence
  Sense Oligo
uugaauaggauguagcaga

SEQ ID NO: 59620 - RNA, 19 nt, Artificial Sequence
  Antisense Oligo
ucugcuacauccuauucaa

SEQ ID NO: 59621 - RNA, 19 nt, Artificial Sequence
  Sense Oligo
auaggauguagcagaagac

SEQ ID NO: 59622 - RNA, 19 nt, Artificial Sequence
  Antisense Oligo
gucuucugcuacauccuau

SEQ ID NO: 59623 - RNA, 19 nt, Artificial Sequence
  Sense Oligo
uaggauguagcagaagacu

SEQ ID NO: 59624 - RNA, 19 nt, Artificial Sequence
  Antisense Oligo
agucuucugcuacauccua

SEQ ID NO: 59625 - RNA, 19 nt, Artificial Sequence
  Sense Oligo
aggauguagcagaagacuc

SEQ ID NO: 59626 - RNA, 19 nt, Artificial Sequence
  Antisense Oligo
gagucuucugcuacauccu

SEQ ID NO: 59627 - RNA, 19 nt, Artificial Sequence
  Sense Oligo
ggauguagcagaagacuca

SEQ ID NO: 59628 - RNA, 19 nt, Artificial Sequence
  Antisense Oligo
ugagucuucugcuacaucc

SEQ ID NO: 59629 - RNA, 19 nt, Artificial Sequence
  Sense Oligo
aacuguaugauugccagaa

SEQ ID NO: 59630 - RNA, 19 nt, Artificial Sequence
  Antisense Oligo
uucuggcaaucauacaguu

SEQ ID NO: 59631 - RNA, 19 nt, Artificial Sequence
  Sense Oligo
acuguaugauugccagaag

SEQ ID NO: 59632 - RNA, 19 nt, Artificial Sequence
  Antisense Oligo
cuucuggcaaucauacagu

SEQ ID NO: 59633 - RNA, 19 nt, Artificial Sequence
  Sense Oligo
uaugauugccagaagcgua

SEQ ID NO: 59634 - RNA, 19 nt, Artificial Sequence
  Antisense Oligo
uacgcuucuggcaaucaua

SEQ ID NO: 59635 - RNA, 19 nt, Artificial Sequence
  Sense Oligo
augauugccagaagcguaa

SEQ ID NO: 59636 - RNA, 19 nt, Artificial Sequence
  Antisense Oligo
uuacgcuucuggcaaucau

SEQ ID NO: 59637 - RNA, 19 nt, Artificial Sequence
  Sense Oligo
ugauugccagaagcguaaa

SEQ ID NO: 59638 - RNA, 19 nt, Artificial Sequence
  Antisense Oligo
uuuacgcuucuggcaauca

SEQ ID NO: 59639 - RNA, 19 nt, Artificial Sequence
  Sense Oligo
gauugccagaagcguaaag

SEQ ID NO: 59640 - RNA, 19 nt, Artificial Sequence
  Antisense Oligo
cuuuacgcuucuggcaauc

SEQ ID NO: 59641 - RNA, 19 nt, Artificial Sequence
  Sense Oligo
auugccagaagcguaaagu

SEQ ID NO: 59642 - RNA, 19 nt, Artificial Sequence
  Antisense Oligo
acuuuacgcuucuggcaau

SEQ ID NO: 59643 - RNA, 19 nt, Artificial Sequence
  Sense Oligo
uugccagaagcguaaaguc

SEQ ID NO: 59644 - RNA, 19 nt, Artificial Sequence
  Antisense Oligo
gacuuuacgcuucuggcaa

SEQ ID NO: 59645 - RNA, 19 nt, Artificial Sequence
  Sense Oligo
ugccagaagcguaaaguca

SEQ ID NO: 59646 - RNA, 19 nt, Artificial Sequence
  Antisense Oligo
ugacuuuacgcuucuggca

SEQ ID NO: 59647 - RNA, 19 nt, Artificial Sequence
  Sense Oligo
agaagcguaaagucacaga

SEQ ID NO: 59648 - RNA, 19 nt, Artificial Sequence
  Antisense Oligo
ucugugacuuuacgcuucu

SEQ ID NO: 59649 - RNA, 19 nt, Artificial Sequence
  Sense Oligo
gaagcguaaagucacagac

SEQ ID NO: 59650 - RNA, 19 nt, Artificial Sequence
  Antisense Oligo
gucugugacuuuacgcuuc

SEQ ID NO: 59651 - RNA, 19 nt, Artificial Sequence
  Sense Oligo
ccacguugggauuagcagu

SEQ ID NO: 59652 - RNA, 19 nt, Artificial Sequence
  Antisense Oligo
acugcuaaucccaacgugg

SEQ ID NO: 59653 - RNA, 19 nt, Artificial Sequence
  Sense Oligo
ggauuagcagugaccugug

SEQ ID NO: 59654 - RNA, 19 nt, Artificial Sequence
  Antisense Oligo
cacaggucacugcuaaucc

SEQ ID NO: 59655 - RNA, 19 nt, Artificial Sequence
  Sense Oligo
gauuagcagugaccugugg

SEQ ID NO: 59656 - RNA, 19 nt, Artificial Sequence
  Antisense Oligo
ccacaggucacugcuaauc

SEQ ID NO: 59657 - RNA, 19 nt, Artificial Sequence
  Sense Oligo
auuagcagugaccuguggg

SEQ ID NO: 59658 - RNA, 19 nt, Artificial Sequence
  Antisense Oligo
cccacaggucacugcuaau

SEQ ID NO: 59659 - RNA, 19 nt, Artificial Sequence
  Sense Oligo
ucaucacucagccagacag

SEQ ID NO: 59660 - RNA, 19 nt, Artificial Sequence
  Antisense Oligo
cugucuggcugagugauga

SEQ ID NO: 59661 - RNA, 19 nt, Artificial Sequence
  Sense Oligo
caucacucagccagacaga

SEQ ID NO: 59662 - RNA, 19 nt, Artificial Sequence
  Antisense Oligo
ucugucuggcugagugaug

SEQ ID NO: 59663 - RNA, 19 nt, Artificial Sequence
  Sense Oligo
aucacucagccagacagaa

SEQ ID NO: 59664 - RNA, 19 nt, Artificial Sequence
  Antisense Oligo
uucugucuggcugagugau

SEQ ID NO: 59665 - RNA, 19 nt, Artificial Sequence
  Sense Oligo
cuggagcaugggcagauca

SEQ ID NO: 59666 - RNA, 19 nt, Artificial Sequence
  Antisense Oligo
ugaucugcccaugcuccag

SEQ ID NO: 59667 - RNA, 19 nt, Artificial Sequence
  Sense Oligo
uggagcaugggcagaucaa

SEQ ID NO: 59668 - RNA, 19 nt, Artificial Sequence
  Antisense Oligo
uugaucugcccaugcucca

SEQ ID NO: 59669 - RNA, 19 nt, Artificial Sequence
  Sense Oligo
ggagcaugggcagaucaaa

SEQ ID NO: 59670 - RNA, 19 nt, Artificial Sequence
  Antisense Oligo
uuugaucugcccaugcucc

SEQ ID NO: 59671 - RNA, 19 nt, Artificial Sequence
  Sense Oligo
aacuccucccugugccuaa

SEQ ID NO: 59672 - RNA, 19 nt, Artificial Sequence
  Antisense Oligo
uuaggcacagggaggaguu

SEQ ID NO: 59673 - RNA, 19 nt, Artificial Sequence
  Sense Oligo
acuccucccugugccuaag

SEQ ID NO: 59674 - RNA, 19 nt, Artificial Sequence
  Antisense Oligo
cuuaggcacagggaggagu

SEQ ID NO: 59675 - RNA, 19 nt, Artificial Sequence
  Sense Oligo
cuccucccugugccuaagc

SEQ ID NO: 59676 - RNA, 19 nt, Artificial Sequence
  Antisense Oligo
gcuuaggcacagggaggag

SEQ ID NO: 59677 - RNA, 19 nt, Artificial Sequence
  Sense Oligo
uccucccugugccuaagca

SEQ ID NO: 59678 - RNA, 19 nt, Artificial Sequence
  Antisense Oligo
ugcuuaggcacagggagga

SEQ ID NO: 59679 - RNA, 19 nt, Artificial Sequence
  Sense Oligo
ccucccugugccuaagcau

SEQ ID NO: 59680 - RNA, 19 nt, Artificial Sequence
  Antisense Oligo
augcuuaggcacagggagg

SEQ ID NO: 59681 - RNA, 19 nt, Artificial Sequence
  Sense Oligo
cucccugugccuaagcauc

SEQ ID NO: 59682 - RNA, 19 nt, Artificial Sequence
  Antisense Oligo
gaugcuuaggcacagggag

SEQ ID NO: 59683 - RNA, 19 nt, Artificial Sequence
  Sense Oligo
ucccugugccuaagcaucg

SEQ ID NO: 59684 - RNA, 19 nt, Artificial Sequence
  Antisense Oligo
cgaugcuuaggcacaggga

SEQ ID NO: 59685 - RNA, 19 nt, Artificial Sequence
  Sense Oligo
cccugugccuaagcaucga

SEQ ID NO: 59686 - RNA, 19 nt, Artificial Sequence
  Antisense Oligo
ucgaugcuuaggcacaggg

SEQ ID NO: 59687 - RNA, 19 nt, Artificial Sequence
  Sense Oligo
ccugugccuaagcaucgag

SEQ ID NO: 59688 - RNA, 19 nt, Artificial Sequence
  Antisense Oligo
cucgaugcuuaggcacagg

SEQ ID NO: 59689 - RNA, 19 nt, Artificial Sequence
  Sense Oligo
cugugccuaagcaucgagg

SEQ ID NO: 59690 - RNA, 19 nt, Artificial Sequence
  Antisense Oligo
ccucgaugcuuaggcacag

SEQ ID NO: 59691 - RNA, 19 nt, Artificial Sequence
  Sense Oligo
ccuaagcaucgaggcguac

SEQ ID NO: 59692 - RNA, 19 nt, Artificial Sequence
  Antisense Oligo
guacgccucgaugcuuagg

SEQ ID NO: 59693 - RNA, 19 nt, Artificial Sequence
  Sense Oligo
cuaagcaucgaggcguacg

SEQ ID NO: 59694 - RNA, 19 nt, Artificial Sequence
  Antisense Oligo
cguacgccucgaugcuuag

SEQ ID NO: 59695 - RNA, 19 nt, Artificial Sequence
  Sense Oligo
uaagcaucgaggcguacgu

SEQ ID NO: 59696 - RNA, 19 nt, Artificial Sequence
  Antisense Oligo
acguacgccucgaugcuua

SEQ ID NO: 59697 - RNA, 19 nt, Artificial Sequence
  Sense Oligo
aagcaucgaggcguacgug

SEQ ID NO: 59698 - RNA, 19 nt, Artificial Sequence
  Antisense Oligo
cacguacgccucgaugcuu

SEQ ID NO: 59699 - RNA, 19 nt, Artificial Sequence
  Sense Oligo
agcaucgaggcguacgugg

SEQ ID NO: 59700 - RNA, 19 nt, Artificial Sequence
  Antisense Oligo
ccacguacgccucgaugcu

SEQ ID NO: 59701 - RNA, 19 nt, Artificial Sequence
  Sense Oligo
gcaucgaggcguacgugga

SEQ ID NO: 59702 - RNA, 19 nt, Artificial Sequence
  Antisense Oligo
uccacguacgccucgaugc

SEQ ID NO: 59703 - RNA, 19 nt, Artificial Sequence
  Sense Oligo
caucgaggcguacguggaa

SEQ ID NO: 59704 - RNA, 19 nt, Artificial Sequence
  Antisense Oligo
uuccacguacgccucgaug

SEQ ID NO: 59705 - RNA, 19 nt, Artificial Sequence
  Sense Oligo
aucgaggcguacguggaag

SEQ ID NO: 59706 - RNA, 19 nt, Artificial Sequence
  Antisense Oligo
cuuccacguacgccucgau

SEQ ID NO: 59707 - RNA, 19 nt, Artificial Sequence
  Sense Oligo
ucgaggcguacguggaaga

SEQ ID NO: 59708 - RNA, 19 nt, Artificial Sequence
  Antisense Oligo
ucuuccacguacgccucga

SEQ ID NO: 59709 - RNA, 19 nt, Artificial Sequence
  Sense Oligo
cgaggcguacguggaagac

SEQ ID NO: 59710 - RNA, 19 nt, Artificial Sequence
  Antisense Oligo
gucuuccacguacgccucg

SEQ ID NO: 59711 - RNA, 19 nt, Artificial Sequence
  Sense Oligo
gaggcguacguggaagacg

SEQ ID NO: 59712 - RNA, 19 nt, Artificial Sequence
  Antisense Oligo
cgucuuccacguacgccuc

SEQ ID NO: 59713 - RNA, 19 nt, Artificial Sequence
  Sense Oligo
guacguggaagacgggagu

SEQ ID NO: 59714 - RNA, 19 nt, Artificial Sequence
  Antisense Oligo
acucccgucuuccacguac

SEQ ID NO: 59715 - RNA, 19 nt, Artificial Sequence
  Sense Oligo
uacguggaagacgggagug

SEQ ID NO: 59716 - RNA, 19 nt, Artificial Sequence
  Antisense Oligo
cacucccgucuuccacgua

SEQ ID NO: 59717 - RNA, 19 nt, Artificial Sequence
  Sense Oligo
acguggaagacgggaguga

SEQ ID NO: 59718 - RNA, 19 nt, Artificial Sequence
  Antisense Oligo
ucacucccgucuuccacgu

SEQ ID NO: 59719 - RNA, 19 nt, Artificial Sequence
  Sense Oligo
cguggaagacgggagugag

SEQ ID NO: 59720 - RNA, 19 nt, Artificial Sequence
  Antisense Oligo
cucacucccgucuuccacg

SEQ ID NO: 59721 - RNA, 19 nt, Artificial Sequence
  Sense Oligo
gaagacgggagugaguggg

SEQ ID NO: 59722 - RNA, 19 nt, Artificial Sequence
  Antisense Oligo
cccacucacucccgucuuc

SEQ ID NO: 59723 - RNA, 19 nt, Artificial Sequence
  Sense Oligo
aagacgggagugagugggu

SEQ ID NO: 59724 - RNA, 19 nt, Artificial Sequence
  Antisense Oligo
acccacucacucccgucuu

SEQ ID NO: 59725 - RNA, 19 nt, Artificial Sequence
  Sense Oligo
agacgggagugagugggug

SEQ ID NO: 59726 - RNA, 19 nt, Artificial Sequence
  Antisense Oligo
cacccacucacucccgucu

SEQ ID NO: 59727 - RNA, 19 nt, Artificial Sequence
  Sense Oligo
gacgggagugagugggugu

SEQ ID NO: 59728 - RNA, 19 nt, Artificial Sequence
  Antisense Oligo
acacccacucacucccguc

SEQ ID NO: 59729 - RNA, 19 nt, Artificial Sequence
  Sense Oligo
acgggagugagugggugug

SEQ ID NO: 59730 - RNA, 19 nt, Artificial Sequence
  Antisense Oligo
cacacccacucacucccgu

SEQ ID NO: 59731 - RNA, 19 nt, Artificial Sequence
  Sense Oligo
gagugagugggugugugcc

SEQ ID NO: 59732 - RNA, 19 nt, Artificial Sequence
  Antisense Oligo
ggcacacacccacucacuc

SEQ ID NO: 59733 - RNA, 19 nt, Artificial Sequence
  Sense Oligo
agugagugggugugugccg

SEQ ID NO: 59734 - RNA, 19 nt, Artificial Sequence
  Antisense Oligo
cggcacacacccacucacu

SEQ ID NO: 59735 - RNA, 19 nt, Artificial Sequence
  Sense Oligo
gggagcagucaaguguacu

SEQ ID NO: 59736 - RNA, 19 nt, Artificial Sequence
  Antisense Oligo
aguacacuugacugcuccc

SEQ ID NO: 59737 - RNA, 19 nt, Artificial Sequence
  Sense Oligo
agucaaguguacuggccac

SEQ ID NO: 59738 - RNA, 19 nt, Artificial Sequence
  Antisense Oligo
guggccaguacacuugacu

SEQ ID NO: 59739 - RNA, 19 nt, Artificial Sequence
  Sense Oligo
gucaaguguacuggccaca

SEQ ID NO: 59740 - RNA, 19 nt, Artificial Sequence
  Antisense Oligo
uguggccaguacacuugac

SEQ ID NO: 59741 - RNA, 19 nt, Artificial Sequence
  Sense Oligo
aguguacuggccacaucug

SEQ ID NO: 59742 - RNA, 19 nt, Artificial Sequence
  Antisense Oligo
cagauguggccaguacacu

SEQ ID NO: 59743 - RNA, 19 nt, Artificial Sequence
  Sense Oligo
guguacuggccacaucugu

SEQ ID NO: 59744 - RNA, 19 nt, Artificial Sequence
  Antisense Oligo
acagauguggccaguacac

SEQ ID NO: 59745 - RNA, 19 nt, Artificial Sequence
  Sense Oligo
uguacuggccacaucuguu

SEQ ID NO: 59746 - RNA, 19 nt, Artificial Sequence
  Antisense Oligo
aacagauguggccaguaca

SEQ ID NO: 59747 - RNA, 19 nt, Artificial Sequence
  Sense Oligo
guacuggccacaucuguug

SEQ ID NO: 59748 - RNA, 19 nt, Artificial Sequence
  Antisense Oligo
caacagauguggccaguac

SEQ ID NO: 59749 - RNA, 19 nt, Artificial Sequence
  Sense Oligo
uacuggccacaucuguugg

SEQ ID NO: 59750 - RNA, 19 nt, Artificial Sequence
  Antisense Oligo
ccaacagauguggccagua

SEQ ID NO: 59751 - RNA, 19 nt, Artificial Sequence
  Sense Oligo
acuggccacaucuguugga

SEQ ID NO: 59752 - RNA, 19 nt, Artificial Sequence
  Antisense Oligo
uccaacagauguggccagu

SEQ ID NO: 59753 - RNA, 19 nt, Artificial Sequence
  Sense Oligo
cuggccacaucuguuggaa

SEQ ID NO: 59754 - RNA, 19 nt, Artificial Sequence
  Antisense Oligo
uuccaacagauguggccag

SEQ ID NO: 59755 - RNA, 19 nt, Artificial Sequence
  Sense Oligo
uggccacaucuguuggaau

SEQ ID NO: 59756 - RNA, 19 nt, Artificial Sequence
  Antisense Oligo
auuccaacagauguggcca

SEQ ID NO: 59757 - RNA, 19 nt, Artificial Sequence
  Sense Oligo
ggccacaucuguuggaauu

SEQ ID NO: 59758 - RNA, 19 nt, Artificial Sequence
  Antisense Oligo
aauuccaacagauguggcc

SEQ ID NO: 59759 - RNA, 19 nt, Artificial Sequence
  Sense Oligo
gccacaucuguuggaauug

SEQ ID NO: 59760 - RNA, 19 nt, Artificial Sequence
  Antisense Oligo
caauuccaacagauguggc

SEQ ID NO: 59761 - RNA, 19 nt, Artificial Sequence
  Sense Oligo
ccacaucuguuggaauugg

SEQ ID NO: 59762 - RNA, 19 nt, Artificial Sequence
  Antisense Oligo
ccaauuccaacagaugugg

SEQ ID NO: 59763 - RNA, 19 nt, Artificial Sequence
  Sense Oligo
cacaucuguuggaauugga

SEQ ID NO: 59764 - RNA, 19 nt, Artificial Sequence
  Antisense Oligo
uccaauuccaacagaugug

SEQ ID NO: 59765 - RNA, 19 nt, Artificial Sequence
  Sense Oligo
acaucuguuggaauuggaa

SEQ ID NO: 59766 - RNA, 19 nt, Artificial Sequence
  Antisense Oligo
uuccaauuccaacagaugu

SEQ ID NO: 59767 - RNA, 19 nt, Artificial Sequence
  Sense Oligo
uuccuaacuuucacccauu

SEQ ID NO: 59768 - RNA, 19 nt, Artificial Sequence
  Antisense Oligo
aaugggugaaaguuaggaa

SEQ ID NO: 59769 - RNA, 19 nt, Artificial Sequence
  Sense Oligo
uccuaacuuucacccauuu

SEQ ID NO: 59770 - RNA, 19 nt, Artificial Sequence
  Antisense Oligo
aaaugggugaaaguuagga

SEQ ID NO: 59771 - RNA, 19 nt, Artificial Sequence
  Sense Oligo
ccuaacuuucacccauuug

SEQ ID NO: 59772 - RNA, 19 nt, Artificial Sequence
  Antisense Oligo
caaaugggugaaaguuagg

SEQ ID NO: 59773 - RNA, 19 nt, Artificial Sequence
  Sense Oligo
cuaacuuucacccauuugc

SEQ ID NO: 59774 - RNA, 19 nt, Artificial Sequence
  Antisense Oligo
gcaaaugggugaaaguuag

SEQ ID NO: 59775 - RNA, 19 nt, Artificial Sequence
  Sense Oligo
uaacuuucacccauuugca

SEQ ID NO: 59776 - RNA, 19 nt, Artificial Sequence
  Antisense Oligo
ugcaaaugggugaaaguua

SEQ ID NO: 59777 - RNA, 19 nt, Artificial Sequence
  Sense Oligo
cccauuugcacuuucauuu

SEQ ID NO: 59778 - RNA, 19 nt, Artificial Sequence
  Antisense Oligo
aaaugaaagugcaaauggg

SEQ ID NO: 59779 - RNA, 19 nt, Artificial Sequence
  Sense Oligo
ccauuugcacuuucauuuu

SEQ ID NO: 59780 - RNA, 19 nt, Artificial Sequence
  Antisense Oligo
aaaaugaaagugcaaaugg

SEQ ID NO: 59781 - RNA, 19 nt, Artificial Sequence
  Sense Oligo
cauuugcacuuucauuuuc

SEQ ID NO: 59782 - RNA, 19 nt, Artificial Sequence
  Antisense Oligo
gaaaaugaaagugcaaaug

SEQ ID NO: 59783 - RNA, 19 nt, Artificial Sequence
  Sense Oligo
uugcacuuucauuuucuac

SEQ ID NO: 59784 - RNA, 19 nt, Artificial Sequence
  Antisense Oligo
guagaaaaugaaagugcaa

SEQ ID NO: 59785 - RNA, 19 nt, Artificial Sequence
  Sense Oligo
ugcacuuucauuuucuaca

SEQ ID NO: 59786 - RNA, 19 nt, Artificial Sequence
  Antisense Oligo
uguagaaaaugaaagugca

SEQ ID NO: 59787 - RNA, 19 nt, Artificial Sequence
  Sense Oligo
ggacuauuauuugcugucu

SEQ ID NO: 59788 - RNA, 19 nt, Artificial Sequence
  Antisense Oligo
agacagcaaauaauagucc

SEQ ID NO: 59789 - RNA, 19 nt, Artificial Sequence
  Sense Oligo
gacuauuauuugcugucua

SEQ ID NO: 59790 - RNA, 19 nt, Artificial Sequence
  Antisense Oligo
uagacagcaaauaauaguc

SEQ ID NO: 59791 - RNA, 19 nt, Artificial Sequence
  Sense Oligo
acuauuauuugcugucuag

SEQ ID NO: 59792 - RNA, 19 nt, Artificial Sequence
  Antisense Oligo
cuagacagcaaauaauagu

SEQ ID NO: 59793 - RNA, 19 nt, Artificial Sequence
  Sense Oligo
cuauuauuugcugucuagc

SEQ ID NO: 59794 - RNA, 19 nt, Artificial Sequence
  Antisense Oligo
gcuagacagcaaauaauag

SEQ ID NO: 59795 - RNA, 19 nt, Artificial Sequence
  Sense Oligo
gcugucuagcaaggaugaa

SEQ ID NO: 59796 - RNA, 19 nt, Artificial Sequence
  Antisense Oligo
uucauccuugcuagacagc

SEQ ID NO: 59797 - RNA, 19 nt, Artificial Sequence
  Sense Oligo
cugucuagcaaggaugaag

SEQ ID NO: 59798 - RNA, 19 nt, Artificial Sequence
  Antisense Oligo
cuucauccuugcuagacag

SEQ ID NO: 59799 - RNA, 19 nt, Artificial Sequence
  Sense Oligo
ugucuagcaaggaugaaga

SEQ ID NO: 59800 - RNA, 19 nt, Artificial Sequence
  Antisense Oligo
ucuucauccuugcuagaca

SEQ ID NO: 59801 - RNA, 19 nt, Artificial Sequence
  Sense Oligo
ucuagcaaggaugaagacg

SEQ ID NO: 59802 - RNA, 19 nt, Artificial Sequence
  Antisense Oligo
cgucuucauccuugcuaga

SEQ ID NO: 59803 - RNA, 19 nt, Artificial Sequence
  Sense Oligo
cuagcaaggaugaagacga

SEQ ID NO: 59804 - RNA, 19 nt, Artificial Sequence
  Antisense Oligo
ucgucuucauccuugcuag

SEQ ID NO: 59805 - RNA, 19 nt, Artificial Sequence
  Sense Oligo
agcaaggaugaagacgagu

SEQ ID NO: 59806 - RNA, 19 nt, Artificial Sequence
  Antisense Oligo
acucgucuucauccuugcu

SEQ ID NO: 59807 - RNA, 19 nt, Artificial Sequence
  Sense Oligo
gcaaggaugaagacgaguu

SEQ ID NO: 59808 - RNA, 19 nt, Artificial Sequence
  Antisense Oligo
aacucgucuucauccuugc

SEQ ID NO: 59809 - RNA, 19 nt, Artificial Sequence
  Sense Oligo
caaggaugaagacgaguug

SEQ ID NO: 59810 - RNA, 19 nt, Artificial Sequence
  Antisense Oligo
caacucgucuucauccuug

SEQ ID NO: 59811 - RNA, 19 nt, Artificial Sequence
  Sense Oligo
aaggaugaagacgaguugg

SEQ ID NO: 59812 - RNA, 19 nt, Artificial Sequence
  Antisense Oligo
ccaacucgucuucauccuu

SEQ ID NO: 59813 - RNA, 19 nt, Artificial Sequence
  Sense Oligo
aggaugaagacgaguugga

SEQ ID NO: 59814 - RNA, 19 nt, Artificial Sequence
  Antisense Oligo
uccaacucgucuucauccu

SEQ ID NO: 59815 - RNA, 19 nt, Artificial Sequence
  Sense Oligo
ggaugaagacgaguuggaa

SEQ ID NO: 59816 - RNA, 19 nt, Artificial Sequence
  Antisense Oligo
uuccaacucgucuucaucc

SEQ ID NO: 59817 - RNA, 19 nt, Artificial Sequence
  Sense Oligo
acuucuguuggucaguuga

SEQ ID NO: 59818 - RNA, 19 nt, Artificial Sequence
  Antisense Oligo
ucaacugaccaacagaagu

SEQ ID NO: 59819 - RNA, 19 nt, Artificial Sequence
  Sense Oligo
cuucuguuggucaguugag

SEQ ID NO: 59820 - RNA, 19 nt, Artificial Sequence
  Antisense Oligo
cucaacugaccaacagaag

SEQ ID NO: 59821 - RNA, 19 nt, Artificial Sequence
  Sense Oligo
uucuguuggucaguugagg

SEQ ID NO: 59822 - RNA, 19 nt, Artificial Sequence
  Antisense Oligo
ccucaacugaccaacagaa

SEQ ID NO: 59823 - RNA, 19 nt, Artificial Sequence
  Sense Oligo
ucuguuggucaguugagga

SEQ ID NO: 59824 - RNA, 19 nt, Artificial Sequence
  Antisense Oligo
uccucaacugaccaacaga

SEQ ID NO: 59825 - RNA, 19 nt, Artificial Sequence
  Sense Oligo
cuguuggucaguugaggag

SEQ ID NO: 59826 - RNA, 19 nt, Artificial Sequence
  Antisense Oligo
cuccucaacugaccaacag

SEQ ID NO: 59827 - RNA, 19 nt, Artificial Sequence
  Sense Oligo
uguuggucaguugaggagu

SEQ ID NO: 59828 - RNA, 19 nt, Artificial Sequence
  Antisense Oligo
acuccucaacugaccaaca

SEQ ID NO: 59829 - RNA, 19 nt, Artificial Sequence
  Sense Oligo
guuggucaguugaggagua

SEQ ID NO: 59830 - RNA, 19 nt, Artificial Sequence
  Antisense Oligo
uacuccucaacugaccaac

SEQ ID NO: 59831 - RNA, 19 nt, Artificial Sequence
  Sense Oligo
uuggucaguugaggaguau

SEQ ID NO: 59832 - RNA, 19 nt, Artificial Sequence
  Antisense Oligo
auacuccucaacugaccaa

SEQ ID NO: 59833 - RNA, 19 nt, Artificial Sequence
  Sense Oligo
uggucaguugaggaguaug

SEQ ID NO: 59834 - RNA, 19 nt, Artificial Sequence
  Antisense Oligo
cauacuccucaacugacca

SEQ ID NO: 59835 - RNA, 19 nt, Artificial Sequence
  Sense Oligo
ggucaguugaggaguauga

SEQ ID NO: 59836 - RNA, 19 nt, Artificial Sequence
  Antisense Oligo
ucauacuccucaacugacc

SEQ ID NO: 59837 - RNA, 19 nt, Artificial Sequence
  Sense Oligo
gaaggacuuccugucaaua

SEQ ID NO: 59838 - RNA, 19 nt, Artificial Sequence
  Antisense Oligo
uauugacaggaaguccuuc

SEQ ID NO: 59839 - RNA, 19 nt, Artificial Sequence
  Sense Oligo
aaggacuuccugucaauac

SEQ ID NO: 59840 - RNA, 19 nt, Artificial Sequence
  Antisense Oligo
guauugacaggaaguccuu

SEQ ID NO: 59841 - RNA, 19 nt, Artificial Sequence
  Sense Oligo
aggacuuccugucaauacu

SEQ ID NO: 59842 - RNA, 19 nt, Artificial Sequence
  Antisense Oligo
aguauugacaggaaguccu

SEQ ID NO: 59843 - RNA, 19 nt, Artificial Sequence
  Sense Oligo
ggacuuccugucaauacug

SEQ ID NO: 59844 - RNA, 19 nt, Artificial Sequence
  Antisense Oligo
caguauugacaggaagucc

SEQ ID NO: 59845 - RNA, 19 nt, Artificial Sequence
  Sense Oligo
uccugucaauacuguggcc

SEQ ID NO: 59846 - RNA, 19 nt, Artificial Sequence
  Antisense Oligo
ggccacaguauugacagga

SEQ ID NO: 59847 - RNA, 19 nt, Artificial Sequence
  Sense Oligo
ccugucaauacuguggccu

SEQ ID NO: 59848 - RNA, 19 nt, Artificial Sequence
  Antisense Oligo
aggccacaguauugacagg

SEQ ID NO: 59849 - RNA, 19 nt, Artificial Sequence
  Sense Oligo
cugucaauacuguggccuc

SEQ ID NO: 59850 - RNA, 19 nt, Artificial Sequence
  Antisense Oligo
gaggccacaguauugacag

SEQ ID NO: 59851 - RNA, 19 nt, Artificial Sequence
  Sense Oligo
ugucaauacuguggccucu

SEQ ID NO: 59852 - RNA, 19 nt, Artificial Sequence
  Antisense Oligo
agaggccacaguauugaca

SEQ ID NO: 59853 - RNA, 19 nt, Artificial Sequence
  Sense Oligo
gucaauacuguggccucuc

SEQ ID NO: 59854 - RNA, 19 nt, Artificial Sequence
  Antisense Oligo
gagaggccacaguauugac

SEQ ID NO: 59855 - RNA, 19 nt, Artificial Sequence
  Sense Oligo
aauacuguggccucucucu

SEQ ID NO: 59856 - RNA, 19 nt, Artificial Sequence
  Antisense Oligo
agagagaggccacaguauu

SEQ ID NO: 59857 - RNA, 19 nt, Artificial Sequence
  Sense Oligo
uacuguggccucucucuca

SEQ ID NO: 59858 - RNA, 19 nt, Artificial Sequence
  Antisense Oligo
ugagagagaggccacagua

SEQ ID NO: 59859 - RNA, 19 nt, Artificial Sequence
  Sense Oligo
acuguggccucucucucag

SEQ ID NO: 59860 - RNA, 19 nt, Artificial Sequence
  Antisense Oligo
cugagagagaggccacagu

SEQ ID NO: 59861 - RNA, 19 nt, Artificial Sequence
  Sense Oligo
uguggccucucucucagau

SEQ ID NO: 59862 - RNA, 19 nt, Artificial Sequence
  Antisense Oligo
aucugagagagaggccaca

SEQ ID NO: 59863 - RNA, 19 nt, Artificial Sequence
  Sense Oligo
ggccucucucucagaugca

SEQ ID NO: 59864 - RNA, 19 nt, Artificial Sequence
  Antisense Oligo
ugcaucugagagagaggcc

SEQ ID NO: 59865 - RNA, 19 nt, Artificial Sequence
  Sense Oligo
cucucagaugcaguuucac

SEQ ID NO: 59866 - RNA, 19 nt, Artificial Sequence
  Antisense Oligo
gugaaacugcaucugagag

SEQ ID NO: 59867 - RNA, 19 nt, Artificial Sequence
  Sense Oligo
cucagaugcaguuucacua

SEQ ID NO: 59868 - RNA, 19 nt, Artificial Sequence
  Antisense Oligo
uagugaaacugcaucugag

SEQ ID NO: 59869 - RNA, 19 nt, Artificial Sequence
  Sense Oligo
ugcaguuucacuacgucga

SEQ ID NO: 59870 - RNA, 19 nt, Artificial Sequence
  Antisense Oligo
ucgacguagugaaacugca

SEQ ID NO: 59871 - RNA, 19 nt, Artificial Sequence
  Sense Oligo
gcaguuucacuacgucgaa

SEQ ID NO: 59872 - RNA, 19 nt, Artificial Sequence
  Antisense Oligo
uucgacguagugaaacugc

SEQ ID NO: 59873 - RNA, 19 nt, Artificial Sequence
  Sense Oligo
caguuucacuacgucgaag

SEQ ID NO: 59874 - RNA, 19 nt, Artificial Sequence
  Antisense Oligo
cuucgacguagugaaacug

SEQ ID NO: 59875 - RNA, 19 nt, Artificial Sequence
  Sense Oligo
aguuucacuacgucgaaga

SEQ ID NO: 59876 - RNA, 19 nt, Artificial Sequence
  Antisense Oligo
ucuucgacguagugaaacu

SEQ ID NO: 59877 - RNA, 19 nt, Artificial Sequence
  Sense Oligo
guuucacuacgucgaagau

SEQ ID NO: 59878 - RNA, 19 nt, Artificial Sequence
  Antisense Oligo
aucuucgacguagugaaac

SEQ ID NO: 59879 - RNA, 19 nt, Artificial Sequence
  Sense Oligo
uuucacuacgucgaagaug

SEQ ID NO: 59880 - RNA, 19 nt, Artificial Sequence
  Antisense Oligo
caucuucgacguagugaaa

SEQ ID NO: 59881 - RNA, 19 nt, Artificial Sequence
  Sense Oligo
uucacuacgucgaagaugc

SEQ ID NO: 59882 - RNA, 19 nt, Artificial Sequence
  Antisense Oligo
gcaucuucgacguagugaa

SEQ ID NO: 59883 - RNA, 19 nt, Artificial Sequence
  Sense Oligo
ucacuacgucgaagaugcu

SEQ ID NO: 59884 - RNA, 19 nt, Artificial Sequence
  Antisense Oligo
agcaucuucgacguaguga

SEQ ID NO: 59885 - RNA, 19 nt, Artificial Sequence
  Sense Oligo
cacuacgucgaagaugcuu

SEQ ID NO: 59886 - RNA, 19 nt, Artificial Sequence
  Antisense Oligo
aagcaucuucgacguagug

SEQ ID NO: 59887 - RNA, 19 nt, Artificial Sequence
  Sense Oligo
acuacgucgaagaugcuua

SEQ ID NO: 59888 - RNA, 19 nt, Artificial Sequence
  Antisense Oligo
uaagcaucuucgacguagu

SEQ ID NO: 59889 - RNA, 19 nt, Artificial Sequence
  Sense Oligo
cuacgucgaagaugcuuag

SEQ ID NO: 59890 - RNA, 19 nt, Artificial Sequence
  Antisense Oligo
cuaagcaucuucgacguag

SEQ ID NO: 59891 - RNA, 19 nt, Artificial Sequence
  Sense Oligo
uacgucgaagaugcuuaga

SEQ ID NO: 59892 - RNA, 19 nt, Artificial Sequence
  Antisense Oligo
ucuaagcaucuucgacgua

SEQ ID NO: 59893 - RNA, 19 nt, Artificial Sequence
  Sense Oligo
acgucgaagaugcuuagau

SEQ ID NO: 59894 - RNA, 19 nt, Artificial Sequence
  Antisense Oligo
aucuaagcaucuucgacgu

SEQ ID NO: 59895 - RNA, 19 nt, Artificial Sequence
  Sense Oligo
cgucgaagaugcuuagauc

SEQ ID NO: 59896 - RNA, 19 nt, Artificial Sequence
  Antisense Oligo
gaucuaagcaucuucgacg

SEQ ID NO: 59897 - RNA, 19 nt, Artificial Sequence
  Sense Oligo
gucgaagaugcuuagaucc

SEQ ID NO: 59898 - RNA, 19 nt, Artificial Sequence
  Antisense Oligo
ggaucuaagcaucuucgac

SEQ ID NO: 59899 - RNA, 19 nt, Artificial Sequence
  Sense Oligo
ucgaagaugcuuagauccu

SEQ ID NO: 59900 - RNA, 19 nt, Artificial Sequence
  Antisense Oligo
aggaucuaagcaucuucga

SEQ ID NO: 59901 - RNA, 19 nt, Artificial Sequence
  Sense Oligo
cgaagaugcuuagauccua

SEQ ID NO: 59902 - RNA, 19 nt, Artificial Sequence
  Antisense Oligo
uaggaucuaagcaucuucg

SEQ ID NO: 59903 - RNA, 19 nt, Artificial Sequence
  Sense Oligo
gaagaugcuuagauccuag

SEQ ID NO: 59904 - RNA, 19 nt, Artificial Sequence
  Antisense Oligo
cuaggaucuaagcaucuuc

SEQ ID NO: 59905 - RNA, 19 nt, Artificial Sequence
  Sense Oligo
aagaugcuuagauccuagg

SEQ ID NO: 59906 - RNA, 19 nt, Artificial Sequence
  Antisense Oligo
ccuaggaucuaagcaucuu

SEQ ID NO: 59907 - RNA, 19 nt, Artificial Sequence
  Sense Oligo
agaugcuuagauccuaggu

SEQ ID NO: 59908 - RNA, 19 nt, Artificial Sequence
  Antisense Oligo
accuaggaucuaagcaucu

SEQ ID NO: 59909 - RNA, 19 nt, Artificial Sequence
  Sense Oligo
gaugcuuagauccuagguc

SEQ ID NO: 59910 - RNA, 19 nt, Artificial Sequence
  Antisense Oligo
gaccuaggaucuaagcauc

SEQ ID NO: 59911 - RNA, 19 nt, Artificial Sequence
  Sense Oligo
augcuuagauccuaggucu

SEQ ID NO: 59912 - RNA, 19 nt, Artificial Sequence
  Antisense Oligo
agaccuaggaucuaagcau

SEQ ID NO: 59913 - RNA, 19 nt, Artificial Sequence
  Sense Oligo
ugcuuagauccuaggucuu

SEQ ID NO: 59914 - RNA, 19 nt, Artificial Sequence
  Antisense Oligo
aagaccuaggaucuaagca

SEQ ID NO: 59915 - RNA, 19 nt, Artificial Sequence
  Sense Oligo
gcuuagauccuaggucuuc

SEQ ID NO: 59916 - RNA, 19 nt, Artificial Sequence
  Antisense Oligo
gaagaccuaggaucuaagc

SEQ ID NO: 59917 - RNA, 19 nt, Artificial Sequence
  Sense Oligo
cuuagauccuaggucuucg

SEQ ID NO: 59918 - RNA, 19 nt, Artificial Sequence
  Antisense Oligo
cgaagaccuaggaucuaag

SEQ ID NO: 59919 - RNA, 19 nt, Artificial Sequence
  Sense Oligo
uuagauccuaggucuucgg

SEQ ID NO: 59920 - RNA, 19 nt, Artificial Sequence
  Antisense Oligo
ccgaagaccuaggaucuaa

SEQ ID NO: 59921 - RNA, 19 nt, Artificial Sequence
  Sense Oligo
uagauccuaggucuucgga

SEQ ID NO: 59922 - RNA, 19 nt, Artificial Sequence
  Antisense Oligo
uccgaagaccuaggaucua

SEQ ID NO: 59923 - RNA, 19 nt, Artificial Sequence
  Sense Oligo
agauccuaggucuucggaa

SEQ ID NO: 59924 - RNA, 19 nt, Artificial Sequence
  Antisense Oligo
uuccgaagaccuaggaucu

SEQ ID NO: 59925 - RNA, 19 nt, Artificial Sequence
  Sense Oligo
gauccuaggucuucggaag

SEQ ID NO: 59926 - RNA, 19 nt, Artificial Sequence
  Antisense Oligo
cuuccgaagaccuaggauc

SEQ ID NO: 59927 - RNA, 19 nt, Artificial Sequence
  Sense Oligo
auccuaggucuucggaagg

SEQ ID NO: 59928 - RNA, 19 nt, Artificial Sequence
  Antisense Oligo
ccuuccgaagaccuaggau

SEQ ID NO: 59929 - RNA, 19 nt, Artificial Sequence
  Sense Oligo
ccuaggucuucggaaggac

SEQ ID NO: 59930 - RNA, 19 nt, Artificial Sequence
  Antisense Oligo
guccuuccgaagaccuagg

SEQ ID NO: 59931 - RNA, 19 nt, Artificial Sequence
  Sense Oligo
cuaggucuucggaaggaca

SEQ ID NO: 59932 - RNA, 19 nt, Artificial Sequence
  Antisense Oligo
uguccuuccgaagaccuag

SEQ ID NO: 59933 - RNA, 19 nt, Artificial Sequence
  Sense Oligo
uaggucuucggaaggacac

SEQ ID NO: 59934 - RNA, 19 nt, Artificial Sequence
  Antisense Oligo
guguccuuccgaagaccua

SEQ ID NO: 59935 - RNA, 19 nt, Artificial Sequence
  Sense Oligo
aggucuucggaaggacacc

SEQ ID NO: 59936 - RNA, 19 nt, Artificial Sequence
  Antisense Oligo
gguguccuuccgaagaccu

SEQ ID NO: 59937 - RNA, 19 nt, Artificial Sequence
  Sense Oligo
ggucuucggaaggacaccc

SEQ ID NO: 59938 - RNA, 19 nt, Artificial Sequence
  Antisense Oligo
ggguguccuuccgaagacc

SEQ ID NO: 59939 - RNA, 19 nt, Artificial Sequence
  Sense Oligo
gucuucggaaggacaccca

SEQ ID NO: 59940 - RNA, 19 nt, Artificial Sequence
  Antisense Oligo
uggguguccuuccgaagac

SEQ ID NO: 59941 - RNA, 19 nt, Artificial Sequence
  Sense Oligo
ucuucggaaggacacccag

SEQ ID NO: 59942 - RNA, 19 nt, Artificial Sequence
  Antisense Oligo
cuggguguccuuccgaaga

SEQ ID NO: 59943 - RNA, 19 nt, Artificial Sequence
  Sense Oligo
cuucggaaggacacccagg

SEQ ID NO: 59944 - RNA, 19 nt, Artificial Sequence
  Antisense Oligo
ccuggguguccuuccgaag

SEQ ID NO: 59945 - RNA, 19 nt, Artificial Sequence
  Sense Oligo
uucggaaggacacccagga

SEQ ID NO: 59946 - RNA, 19 nt, Artificial Sequence
  Antisense Oligo
uccuggguguccuuccgaa

SEQ ID NO: 59947 - RNA, 19 nt, Artificial Sequence
  Sense Oligo
ucggaaggacacccaggaa

SEQ ID NO: 59948 - RNA, 19 nt, Artificial Sequence
  Antisense Oligo
uuccuggguguccuuccga

SEQ ID NO: 59949 - RNA, 19 nt, Artificial Sequence
  Sense Oligo
gaaggacacccaggaauaa

SEQ ID NO: 59950 - RNA, 19 nt, Artificial Sequence
  Antisense Oligo
uuauuccuggguguccuuc

SEQ ID NO: 59951 - RNA, 19 nt, Artificial Sequence
  Sense Oligo
aggacacccaggaauaagg

SEQ ID NO: 59952 - RNA, 19 nt, Artificial Sequence
  Antisense Oligo
ccuuauuccuggguguccu

SEQ ID NO: 59953 - RNA, 19 nt, Artificial Sequence
  Sense Oligo
ggacacccaggaauaaggc

SEQ ID NO: 59954 - RNA, 19 nt, Artificial Sequence
  Antisense Oligo
gccuuauuccugggugucc

SEQ ID NO: 59955 - RNA, 19 nt, Artificial Sequence
  Sense Oligo
gacacccaggaauaaggcc

SEQ ID NO: 59956 - RNA, 19 nt, Artificial Sequence
  Antisense Oligo
ggccuuauuccuggguguc

SEQ ID NO: 59957 - RNA, 19 nt, Artificial Sequence
  Sense Oligo
acacccaggaauaaggcca

SEQ ID NO: 59958 - RNA, 19 nt, Artificial Sequence
  Antisense Oligo
uggccuuauuccugggugu

SEQ ID NO: 59959 - RNA, 19 nt, Artificial Sequence
  Sense Oligo
cacccaggaauaaggccag

SEQ ID NO: 59960 - RNA, 19 nt, Artificial Sequence
  Antisense Oligo
cuggccuuauuccugggug

SEQ ID NO: 59961 - RNA, 19 nt, Artificial Sequence
  Sense Oligo
acccaggaauaaggccagc

SEQ ID NO: 59962 - RNA, 19 nt, Artificial Sequence
  Antisense Oligo
gcuggccuuauuccugggu

SEQ ID NO: 59963 - RNA, 19 nt, Artificial Sequence
  Sense Oligo
aggaauaaggccagcccuc

SEQ ID NO: 59964 - RNA, 19 nt, Artificial Sequence
  Antisense Oligo
gagggcuggccuuauuccu

SEQ ID NO: 59965 - RNA, 19 nt, Artificial Sequence
  Sense Oligo
ggaauaaggccagcccucg

SEQ ID NO: 59966 - RNA, 19 nt, Artificial Sequence
  Antisense Oligo
cgagggcuggccuuauucc

SEQ ID NO: 59967 - RNA, 19 nt, Artificial Sequence
  Sense Oligo
cucgcugccuaagcucugg

SEQ ID NO: 59968 - RNA, 19 nt, Artificial Sequence
  Antisense Oligo
ccagagcuuaggcagcgag

SEQ ID NO: 59969 - RNA, 19 nt, Artificial Sequence
  Sense Oligo
ucgcugccuaagcucuggg

SEQ ID NO: 59970 - RNA, 19 nt, Artificial Sequence
  Antisense Oligo
cccagagcuuaggcagcga

SEQ ID NO: 59971 - RNA, 19 nt, Artificial Sequence
  Sense Oligo
cgcugccuaagcucugggu

SEQ ID NO: 59972 - RNA, 19 nt, Artificial Sequence
  Antisense Oligo
acccagagcuuaggcagcg

SEQ ID NO: 59973 - RNA, 19 nt, Artificial Sequence
  Sense Oligo
gcugccuaagcucuggguc

SEQ ID NO: 59974 - RNA, 19 nt, Artificial Sequence
  Antisense Oligo
gacccagagcuuaggcagc

SEQ ID NO: 59975 - RNA, 19 nt, Artificial Sequence
  Sense Oligo
cugccuaagcucugggucu

SEQ ID NO: 59976 - RNA, 19 nt, Artificial Sequence
  Antisense Oligo
agacccagagcuuaggcag

SEQ ID NO: 59977 - RNA, 19 nt, Artificial Sequence
  Sense Oligo
ugccuaagcucugggucuc

SEQ ID NO: 59978 - RNA, 19 nt, Artificial Sequence
  Antisense Oligo
gagacccagagcuuaggca

SEQ ID NO: 59979 - RNA, 19 nt, Artificial Sequence
  Sense Oligo
gccuaagcucugggucucu

SEQ ID NO: 59980 - RNA, 19 nt, Artificial Sequence
  Antisense Oligo
agagacccagagcuuaggc

SEQ ID NO: 59981 - RNA, 19 nt, Artificial Sequence
  Sense Oligo
ccuaagcucugggucucuu

SEQ ID NO: 59982 - RNA, 19 nt, Artificial Sequence
  Antisense Oligo
aagagacccagagcuuagg

SEQ ID NO: 59983 - RNA, 19 nt, Artificial Sequence
  Sense Oligo
uaagcucugggucucuucu

SEQ ID NO: 59984 - RNA, 19 nt, Artificial Sequence
  Antisense Oligo
agaagagacccagagcuua

SEQ ID NO: 59985 - RNA, 19 nt, Artificial Sequence
  Sense Oligo
ucuucuuucagcagcuucu

SEQ ID NO: 59986 - RNA, 19 nt, Artificial Sequence
  Antisense Oligo
agaagcugcugaaagaaga

SEQ ID NO: 59987 - RNA, 19 nt, Artificial Sequence
  Sense Oligo
cuucuuucagcagcuucuc

SEQ ID NO: 59988 - RNA, 19 nt, Artificial Sequence
  Antisense Oligo
gagaagcugcugaaagaag

SEQ ID NO: 59989 - RNA, 19 nt, Artificial Sequence
  Sense Oligo
uucuuucagcagcuucucu

SEQ ID NO: 59990 - RNA, 19 nt, Artificial Sequence
  Antisense Oligo
agagaagcugcugaaagaa

SEQ ID NO: 59991 - RNA, 19 nt, Artificial Sequence
  Sense Oligo
cagcagcuucucuccguac

SEQ ID NO: 59992 - RNA, 19 nt, Artificial Sequence
  Antisense Oligo
guacggagagaagcugcug

SEQ ID NO: 59993 - RNA, 19 nt, Artificial Sequence
  Sense Oligo
agcagcuucucuccguacc

SEQ ID NO: 59994 - RNA, 19 nt, Artificial Sequence
  Antisense Oligo
gguacggagagaagcugcu

SEQ ID NO: 59995 - RNA, 19 nt, Artificial Sequence
  Sense Oligo
gcagcuucucuccguaccc

SEQ ID NO: 59996 - RNA, 19 nt, Artificial Sequence
  Antisense Oligo
ggguacggagagaagcugc

SEQ ID NO: 59997 - RNA, 19 nt, Artificial Sequence
  Sense Oligo
cagcuucucuccguaccca

SEQ ID NO: 59998 - RNA, 19 nt, Artificial Sequence
  Antisense Oligo
uggguacggagagaagcug

SEQ ID NO: 59999 - RNA, 19 nt, Artificial Sequence
  Sense Oligo
agcuucucuccguacccag

SEQ ID NO: 60000 - RNA, 19 nt, Artificial Sequence
  Antisense Oligo
cuggguacggagagaagcu

SEQ ID NO: 60001 - RNA, 19 nt, Artificial Sequence
  Sense Oligo
gcuucucuccguacccagc

SEQ ID NO: 60002 - RNA, 19 nt, Artificial Sequence
  Antisense Oligo
gcuggguacggagagaagc

SEQ ID NO: 60003 - RNA, 19 nt, Artificial Sequence
  Sense Oligo
uccguacccagccaguuac

SEQ ID NO: 60004 - RNA, 19 nt, Artificial Sequence
  Antisense Oligo
guaacuggcuggguacgga

SEQ ID NO: 60005 - RNA, 19 nt, Artificial Sequence
  Sense Oligo
ccguacccagccaguuaca

SEQ ID NO: 60006 - RNA, 19 nt, Artificial Sequence
  Antisense Oligo
uguaacuggcuggguacgg

SEQ ID NO: 60007 - RNA, 19 nt, Artificial Sequence
  Sense Oligo
ccagccaguuacaugggcc

SEQ ID NO: 60008 - RNA, 19 nt, Artificial Sequence
  Antisense Oligo
ggcccauguaacuggcugg

SEQ ID NO: 60009 - RNA, 19 nt, Artificial Sequence
  Sense Oligo
agggacagauuuccuucau

SEQ ID NO: 60010 - RNA, 19 nt, Artificial Sequence
  Antisense Oligo
augaaggaaaucugucccu

SEQ ID NO: 60011 - RNA, 19 nt, Artificial Sequence
  Sense Oligo
gggacagauuuccuucauc

SEQ ID NO: 60012 - RNA, 19 nt, Artificial Sequence
  Antisense Oligo
gaugaaggaaaucuguccc

SEQ ID NO: 60013 - RNA, 19 nt, Artificial Sequence
  Sense Oligo
ggacagauuuccuucauca

SEQ ID NO: 60014 - RNA, 19 nt, Artificial Sequence
  Antisense Oligo
ugaugaaggaaaucugucc

SEQ ID NO: 60015 - RNA, 19 nt, Artificial Sequence
  Sense Oligo
ucagccuuugauggacgcg

SEQ ID NO: 60016 - RNA, 19 nt, Artificial Sequence
  Antisense Oligo
cgcguccaucaaaggcuga

SEQ ID NO: 60017 - RNA, 19 nt, Artificial Sequence
  Sense Oligo
cagccuuugauggacgcgg

SEQ ID NO: 60018 - RNA, 19 nt, Artificial Sequence
  Antisense Oligo
ccgcguccaucaaaggcug

SEQ ID NO: 60019 - RNA, 19 nt, Artificial Sequence
  Sense Oligo
agcuccauagaggcugggc

SEQ ID NO: 60020 - RNA, 19 nt, Artificial Sequence
  Antisense Oligo
gcccagccucuauggagcu

SEQ ID NO: 60021 - RNA, 19 nt, Artificial Sequence
  Sense Oligo
uccauuucuagcacacugc

SEQ ID NO: 60022 - RNA, 19 nt, Artificial Sequence
  Antisense Oligo
gcagugugcuagaaaugga

SEQ ID NO: 60023 - RNA, 19 nt, Artificial Sequence
  Sense Oligo
ccauuucuagcacacugca

SEQ ID NO: 60024 - RNA, 19 nt, Artificial Sequence
  Antisense Oligo
ugcagugugcuagaaaugg

SEQ ID NO: 60025 - RNA, 19 nt, Artificial Sequence
  Sense Oligo
cuagcacacugcacugucu

SEQ ID NO: 60026 - RNA, 19 nt, Artificial Sequence
  Antisense Oligo
agacagugcagugugcuag

SEQ ID NO: 60027 - RNA, 19 nt, Artificial Sequence
  Sense Oligo
uagcacacugcacugucug

SEQ ID NO: 60028 - RNA, 19 nt, Artificial Sequence
  Antisense Oligo
cagacagugcagugugcua

SEQ ID NO: 60029 - RNA, 19 nt, Artificial Sequence
  Sense Oligo
agcacacugcacugucugu

SEQ ID NO: 60030 - RNA, 19 nt, Artificial Sequence
  Antisense Oligo
acagacagugcagugugcu

SEQ ID NO: 60031 - RNA, 19 nt, Artificial Sequence
  Sense Oligo
gcacacugcacugucugua

SEQ ID NO: 60032 - RNA, 19 nt, Artificial Sequence
  Antisense Oligo
uacagacagugcagugugc

SEQ ID NO: 60033 - RNA, 19 nt, Artificial Sequence
  Sense Oligo
acugcacugucuguagacu

SEQ ID NO: 60034 - RNA, 19 nt, Artificial Sequence
  Antisense Oligo
agucuacagacagugcagu

SEQ ID NO: 60035 - RNA, 19 nt, Artificial Sequence
  Sense Oligo
cugcacugucuguagacuu

SEQ ID NO: 60036 - RNA, 19 nt, Artificial Sequence
  Antisense Oligo
aagucuacagacagugcag

SEQ ID NO: 60037 - RNA, 19 nt, Artificial Sequence
  Sense Oligo
acugucuguagacuugugg

SEQ ID NO: 60038 - RNA, 19 nt, Artificial Sequence
  Antisense Oligo
ccacaagucuacagacagu

SEQ ID NO: 60039 - RNA, 19 nt, Artificial Sequence
  Sense Oligo
cugucuguagacuuguggg

SEQ ID NO: 60040 - RNA, 19 nt, Artificial Sequence
  Antisense Oligo
cccacaagucuacagacag

SEQ ID NO: 60041 - RNA, 19 nt, Artificial Sequence
  Sense Oligo
cuguagacuugugggaaga

SEQ ID NO: 60042 - RNA, 19 nt, Artificial Sequence
  Antisense Oligo
ucuucccacaagucuacag

SEQ ID NO: 60043 - RNA, 19 nt, Artificial Sequence
  Sense Oligo
uguagacuugugggaagaa

SEQ ID NO: 60044 - RNA, 19 nt, Artificial Sequence
  Antisense Oligo
uucuucccacaagucuaca

SEQ ID NO: 60045 - RNA, 19 nt, Artificial Sequence
  Sense Oligo
aacuuuucccguuuucaag

SEQ ID NO: 60046 - RNA, 19 nt, Artificial Sequence
  Antisense Oligo
cuugaaaacgggaaaaguu

SEQ ID NO: 60047 - RNA, 19 nt, Artificial Sequence
  Sense Oligo
acuuuucccguuuucaagc

SEQ ID NO: 60048 - RNA, 19 nt, Artificial Sequence
  Antisense Oligo
gcuugaaaacgggaaaagu

SEQ ID NO: 60049 - RNA, 19 nt, Artificial Sequence
  Sense Oligo
cuuuucccguuuucaagcu

SEQ ID NO: 60050 - RNA, 19 nt, Artificial Sequence
  Antisense Oligo
agcuugaaaacgggaaaag

SEQ ID NO: 60051 - RNA, 19 nt, Artificial Sequence
  Sense Oligo
ucccguuuucaagcuccac

SEQ ID NO: 60052 - RNA, 19 nt, Artificial Sequence
  Antisense Oligo
guggagcuugaaaacggga

SEQ ID NO: 60053 - RNA, 19 nt, Artificial Sequence
  Sense Oligo
cccguuuucaagcuccacg

SEQ ID NO: 60054 - RNA, 19 nt, Artificial Sequence
  Antisense Oligo
cguggagcuugaaaacggg

SEQ ID NO: 60055 - RNA, 19 nt, Artificial Sequence
  Sense Oligo
ccguuuucaagcuccacgc

SEQ ID NO: 60056 - RNA, 19 nt, Artificial Sequence
  Antisense Oligo
gcguggagcuugaaaacgg

SEQ ID NO: 60057 - RNA, 19 nt, Artificial Sequence
  Sense Oligo
cguuuucaagcuccacgcu

SEQ ID NO: 60058 - RNA, 19 nt, Artificial Sequence
  Antisense Oligo
agcguggagcuugaaaacg

SEQ ID NO: 60059 - RNA, 19 nt, Artificial Sequence
  Sense Oligo
guuuucaagcuccacgcug

SEQ ID NO: 60060 - RNA, 19 nt, Artificial Sequence
  Antisense Oligo
cagcguggagcuugaaaac

SEQ ID NO: 60061 - RNA, 19 nt, Artificial Sequence
  Sense Oligo
uuuucaagcuccacgcugc

SEQ ID NO: 60062 - RNA, 19 nt, Artificial Sequence
  Antisense Oligo
gcagcguggagcuugaaaa

SEQ ID NO: 60063 - RNA, 19 nt, Artificial Sequence
  Sense Oligo
uuucaagcuccacgcugca

SEQ ID NO: 60064 - RNA, 19 nt, Artificial Sequence
  Antisense Oligo
ugcagcguggagcuugaaa

SEQ ID NO: 60065 - RNA, 19 nt, Artificial Sequence
  Sense Oligo
uucaagcuccacgcugcau

SEQ ID NO: 60066 - RNA, 19 nt, Artificial Sequence
  Antisense Oligo
augcagcguggagcuugaa

SEQ ID NO: 60067 - RNA, 19 nt, Artificial Sequence
  Sense Oligo
ucaagcuccacgcugcauc

SEQ ID NO: 60068 - RNA, 19 nt, Artificial Sequence
  Antisense Oligo
gaugcagcguggagcuuga

SEQ ID NO: 60069 - RNA, 19 nt, Artificial Sequence
  Sense Oligo
caagcuccacgcugcauca

SEQ ID NO: 60070 - RNA, 19 nt, Artificial Sequence
  Antisense Oligo
ugaugcagcguggagcuug

SEQ ID NO: 60071 - RNA, 19 nt, Artificial Sequence
  Sense Oligo
aagcuccacgcugcaucac

SEQ ID NO: 60072 - RNA, 19 nt, Artificial Sequence
  Antisense Oligo
gugaugcagcguggagcuu

SEQ ID NO: 60073 - RNA, 19 nt, Artificial Sequence
  Sense Oligo
agcuccacgcugcaucaca

SEQ ID NO: 60074 - RNA, 19 nt, Artificial Sequence
  Antisense Oligo
ugugaugcagcguggagcu

SEQ ID NO: 60075 - RNA, 19 nt, Artificial Sequence
  Sense Oligo
gcuccacgcugcaucacag

SEQ ID NO: 60076 - RNA, 19 nt, Artificial Sequence
  Antisense Oligo
cugugaugcagcguggagc

SEQ ID NO: 60077 - RNA, 19 nt, Artificial Sequence
  Sense Oligo
cuccacgcugcaucacagg

SEQ ID NO: 60078 - RNA, 19 nt, Artificial Sequence
  Antisense Oligo
ccugugaugcagcguggag

SEQ ID NO: 60079 - RNA, 19 nt, Artificial Sequence
  Sense Oligo
uccacgcugcaucacagga

SEQ ID NO: 60080 - RNA, 19 nt, Artificial Sequence
  Antisense Oligo
uccugugaugcagcgugga

SEQ ID NO: 60081 - RNA, 19 nt, Artificial Sequence
  Sense Oligo
ccacgcugcaucacaggaa

SEQ ID NO: 60082 - RNA, 19 nt, Artificial Sequence
  Antisense Oligo
uuccugugaugcagcgugg

SEQ ID NO: 60083 - RNA, 19 nt, Artificial Sequence
  Sense Oligo
aaugacacugaccagauua

SEQ ID NO: 60084 - RNA, 19 nt, Artificial Sequence
  Antisense Oligo
uaaucuggucagugucauu

SEQ ID NO: 60085 - RNA, 19 nt, Artificial Sequence
  Sense Oligo
augacacugaccagauuaa

SEQ ID NO: 60086 - RNA, 19 nt, Artificial Sequence
  Antisense Oligo
uuaaucuggucagugucau

SEQ ID NO: 60087 - RNA, 19 nt, Artificial Sequence
  Sense Oligo
ugacacugaccagauuaag

SEQ ID NO: 60088 - RNA, 19 nt, Artificial Sequence
  Antisense Oligo
cuuaaucuggucaguguca

SEQ ID NO: 60089 - RNA, 19 nt, Artificial Sequence
  Sense Oligo
gacacugaccagauuaagc

SEQ ID NO: 60090 - RNA, 19 nt, Artificial Sequence
  Antisense Oligo
gcuuaaucuggucaguguc

SEQ ID NO: 60091 - RNA, 19 nt, Artificial Sequence
  Sense Oligo
cugaccagauuaagcuaca

SEQ ID NO: 60092 - RNA, 19 nt, Artificial Sequence
  Antisense Oligo
uguagcuuaaucuggucag

SEQ ID NO: 60093 - RNA, 19 nt, Artificial Sequence
  Sense Oligo
gucucgcagccagucucaa

SEQ ID NO: 60094 - RNA, 19 nt, Artificial Sequence
  Antisense Oligo
uugagacuggcugcgagac

SEQ ID NO: 60095 - RNA, 19 nt, Artificial Sequence
  Sense Oligo
ucucgcagccagucucaaa

SEQ ID NO: 60096 - RNA, 19 nt, Artificial Sequence
  Antisense Oligo
uuugagacuggcugcgaga

SEQ ID NO: 60097 - RNA, 19 nt, Artificial Sequence
  Sense Oligo
cucgcagccagucucaaag

SEQ ID NO: 60098 - RNA, 19 nt, Artificial Sequence
  Antisense Oligo
cuuugagacuggcugcgag

SEQ ID NO: 60099 - RNA, 19 nt, Artificial Sequence
  Sense Oligo
ucgcagccagucucaaagu

SEQ ID NO: 60100 - RNA, 19 nt, Artificial Sequence
  Antisense Oligo
acuuugagacuggcugcga

SEQ ID NO: 60101 - RNA, 19 nt, Artificial Sequence
  Sense Oligo
cgcagccagucucaaaguc

SEQ ID NO: 60102 - RNA, 19 nt, Artificial Sequence
  Antisense Oligo
gacuuugagacuggcugcg

SEQ ID NO: 60103 - RNA, 19 nt, Artificial Sequence
  Sense Oligo
gcagccagucucaaagucu

SEQ ID NO: 60104 - RNA, 19 nt, Artificial Sequence
  Antisense Oligo
agacuuugagacuggcugc

SEQ ID NO: 60105 - RNA, 19 nt, Artificial Sequence
  Sense Oligo
aaaauuguuacuggguggu

SEQ ID NO: 60106 - RNA, 19 nt, Artificial Sequence
  Antisense Oligo
accacccaguaacaauuuu

SEQ ID NO: 60107 - RNA, 19 nt, Artificial Sequence
  Sense Oligo
aaauuguuacugggugguc

SEQ ID NO: 60108 - RNA, 19 nt, Artificial Sequence
  Antisense Oligo
gaccacccaguaacaauuu

SEQ ID NO: 60109 - RNA, 19 nt, Artificial Sequence
  Sense Oligo
aauuguuacuggguggucu

SEQ ID NO: 60110 - RNA, 19 nt, Artificial Sequence
  Antisense Oligo
agaccacccaguaacaauu

SEQ ID NO: 60111 - RNA, 19 nt, Artificial Sequence
  Sense Oligo
auuguuacuggguggucuu

SEQ ID NO: 60112 - RNA, 19 nt, Artificial Sequence
  Antisense Oligo
aagaccacccaguaacaau

SEQ ID NO: 60113 - RNA, 19 nt, Artificial Sequence
  Sense Oligo
uuguuacuggguggucuuc

SEQ ID NO: 60114 - RNA, 19 nt, Artificial Sequence
  Antisense Oligo
gaagaccacccaguaacaa

SEQ ID NO: 60115 - RNA, 19 nt, Artificial Sequence
  Sense Oligo
uacuggguggucuucccuu

SEQ ID NO: 60116 - RNA, 19 nt, Artificial Sequence
  Antisense Oligo
aagggaagaccacccagua

SEQ ID NO: 60117 - RNA, 19 nt, Artificial Sequence
  Sense Oligo
acuggguggucuucccuuc

SEQ ID NO: 60118 - RNA, 19 nt, Artificial Sequence
  Antisense Oligo
gaagggaagaccacccagu

SEQ ID NO: 60119 - RNA, 19 nt, Artificial Sequence
  Sense Oligo
cuggguggucuucccuucu

SEQ ID NO: 60120 - RNA, 19 nt, Artificial Sequence
  Antisense Oligo
agaagggaagaccacccag

SEQ ID NO: 60121 - RNA, 19 nt, Artificial Sequence
  Sense Oligo
uggguggucuucccuucuc

SEQ ID NO: 60122 - RNA, 19 nt, Artificial Sequence
  Antisense Oligo
gagaagggaagaccaccca

SEQ ID NO: 60123 - RNA, 19 nt, Artificial Sequence
  Sense Oligo
uucuccaggaagcagagcu

SEQ ID NO: 60124 - RNA, 19 nt, Artificial Sequence
  Antisense Oligo
agcucugcuuccuggagaa

SEQ ID NO: 60125 - RNA, 19 nt, Artificial Sequence
  Sense Oligo
ucuccaggaagcagagcug

SEQ ID NO: 60126 - RNA, 19 nt, Artificial Sequence
  Antisense Oligo
cagcucugcuuccuggaga

SEQ ID NO: 60127 - RNA, 19 nt, Artificial Sequence
  Sense Oligo
uccaggaagcagagcugag

SEQ ID NO: 60128 - RNA, 19 nt, Artificial Sequence
  Antisense Oligo
cucagcucugcuuccugga

SEQ ID NO: 60129 - RNA, 19 nt, Artificial Sequence
  Sense Oligo
aggaagcagagcugaggcu

SEQ ID NO: 60130 - RNA, 19 nt, Artificial Sequence
  Antisense Oligo
agccucagcucugcuuccu

SEQ ID NO: 60131 - RNA, 19 nt, Artificial Sequence
  Sense Oligo
aagcagagcugaggcuggu

SEQ ID NO: 60132 - RNA, 19 nt, Artificial Sequence
  Antisense Oligo
accagccucagcucugcuu

SEQ ID NO: 60133 - RNA, 19 nt, Artificial Sequence
  Sense Oligo
agcagagcugaggcuggua

SEQ ID NO: 60134 - RNA, 19 nt, Artificial Sequence
  Antisense Oligo
uaccagccucagcucugcu

SEQ ID NO: 60135 - RNA, 19 nt, Artificial Sequence
  Sense Oligo
gcagagcugaggcugguaa

SEQ ID NO: 60136 - RNA, 19 nt, Artificial Sequence
  Antisense Oligo
uuaccagccucagcucugc

SEQ ID NO: 60137 - RNA, 19 nt, Artificial Sequence
  Sense Oligo
gagcugaggcugguaaagu

SEQ ID NO: 60138 - RNA, 19 nt, Artificial Sequence
  Antisense Oligo
acuuuaccagccucagcuc

SEQ ID NO: 60139 - RNA, 19 nt, Artificial Sequence
  Sense Oligo
agcugaggcugguaaaguu

SEQ ID NO: 60140 - RNA, 19 nt, Artificial Sequence
  Antisense Oligo
aacuuuaccagccucagcu

SEQ ID NO: 60141 - RNA, 19 nt, Artificial Sequence
  Sense Oligo
gcugaggcugguaaaguuc

SEQ ID NO: 60142 - RNA, 19 nt, Artificial Sequence
  Antisense Oligo
gaacuuuaccagccucagc

SEQ ID NO: 60143 - RNA, 19 nt, Artificial Sequence
  Sense Oligo
cugaggcugguaaaguucc

SEQ ID NO: 60144 - RNA, 19 nt, Artificial Sequence
  Antisense Oligo
ggaacuuuaccagccucag

SEQ ID NO: 60145 - RNA, 19 nt, Artificial Sequence
  Sense Oligo
ugaggcugguaaaguuccu

SEQ ID NO: 60146 - RNA, 19 nt, Artificial Sequence
  Antisense Oligo
aggaacuuuaccagccuca

SEQ ID NO: 60147 - RNA, 19 nt, Artificial Sequence
  Sense Oligo
cugguaaaguuccugccug

SEQ ID NO: 60148 - RNA, 19 nt, Artificial Sequence
  Antisense Oligo
caggcaggaacuuuaccag

SEQ ID NO: 60149 - RNA, 19 nt, Artificial Sequence
  Sense Oligo
ugguaaaguuccugccuga

SEQ ID NO: 60150 - RNA, 19 nt, Artificial Sequence
  Antisense Oligo
ucaggcaggaacuuuacca

SEQ ID NO: 60151 - RNA, 19 nt, Artificial Sequence
  Sense Oligo
gguaaaguuccugccugag

SEQ ID NO: 60152 - RNA, 19 nt, Artificial Sequence
  Antisense Oligo
cucaggcaggaacuuuacc

SEQ ID NO: 60153 - RNA, 19 nt, Artificial Sequence
  Sense Oligo
ugcaaagggaucuagugaa

SEQ ID NO: 60154 - RNA, 19 nt, Artificial Sequence
  Antisense Oligo
uucacuagaucccuuugca

SEQ ID NO: 60155 - RNA, 19 nt, Artificial Sequence
  Sense Oligo
gcaaagggaucuagugaag

SEQ ID NO: 60156 - RNA, 19 nt, Artificial Sequence
  Antisense Oligo
cuucacuagaucccuuugc

SEQ ID NO: 60157 - RNA, 19 nt, Artificial Sequence
  Sense Oligo
caaagggaucuagugaagc

SEQ ID NO: 60158 - RNA, 19 nt, Artificial Sequence
  Antisense Oligo
gcuucacuagaucccuuug

SEQ ID NO: 60159 - RNA, 19 nt, Artificial Sequence
  Sense Oligo
aaagggaucuagugaagca

SEQ ID NO: 60160 - RNA, 19 nt, Artificial Sequence
  Antisense Oligo
ugcuucacuagaucccuuu

SEQ ID NO: 60161 - RNA, 19 nt, Artificial Sequence
  Sense Oligo
aagggaucuagugaagcag

SEQ ID NO: 60162 - RNA, 19 nt, Artificial Sequence
  Antisense Oligo
cugcuucacuagaucccuu

SEQ ID NO: 60163 - RNA, 19 nt, Artificial Sequence
  Sense Oligo
agggaucuagugaagcagu

SEQ ID NO: 60164 - RNA, 19 nt, Artificial Sequence
  Antisense Oligo
acugcuucacuagaucccu

SEQ ID NO: 60165 - RNA, 19 nt, Artificial Sequence
  Sense Oligo
gggaucuagugaagcaguu

SEQ ID NO: 60166 - RNA, 19 nt, Artificial Sequence
  Antisense Oligo
aacugcuucacuagauccc

SEQ ID NO: 60167 - RNA, 19 nt, Artificial Sequence
  Sense Oligo
ggaucuagugaagcaguuc

SEQ ID NO: 60168 - RNA, 19 nt, Artificial Sequence
  Antisense Oligo
gaacugcuucacuagaucc

SEQ ID NO: 60169 - RNA, 19 nt, Artificial Sequence
  Sense Oligo
gaucuagugaagcaguucc

SEQ ID NO: 60170 - RNA, 19 nt, Artificial Sequence
  Antisense Oligo
ggaacugcuucacuagauc

SEQ ID NO: 60171 - RNA, 19 nt, Artificial Sequence
  Sense Oligo
aucuagugaagcaguucca

SEQ ID NO: 60172 - RNA, 19 nt, Artificial Sequence
  Antisense Oligo
uggaacugcuucacuagau

SEQ ID NO: 60173 - RNA, 19 nt, Artificial Sequence
  Sense Oligo
ucuagugaagcaguuccag

SEQ ID NO: 60174 - RNA, 19 nt, Artificial Sequence
  Antisense Oligo
cuggaacugcuucacuaga

SEQ ID NO: 60175 - RNA, 19 nt, Artificial Sequence
  Sense Oligo
cuagugaagcaguuccaga

SEQ ID NO: 60176 - RNA, 19 nt, Artificial Sequence
  Antisense Oligo
ucuggaacugcuucacuag

SEQ ID NO: 60177 - RNA, 19 nt, Artificial Sequence
  Sense Oligo
uagugaagcaguuccagaa

SEQ ID NO: 60178 - RNA, 19 nt, Artificial Sequence
  Antisense Oligo
uucuggaacugcuucacua

SEQ ID NO: 60179 - RNA, 19 nt, Artificial Sequence
  Sense Oligo
aacguccagcaaguugaau

SEQ ID NO: 60180 - RNA, 19 nt, Artificial Sequence
  Antisense Oligo
auucaacuugcuggacguu

SEQ ID NO: 60181 - RNA, 19 nt, Artificial Sequence
  Sense Oligo
acguccagcaaguugaaua

SEQ ID NO: 60182 - RNA, 19 nt, Artificial Sequence
  Antisense Oligo
uauucaacuugcuggacgu

SEQ ID NO: 60183 - RNA, 19 nt, Artificial Sequence
  Sense Oligo
cguccagcaaguugaauac

SEQ ID NO: 60184 - RNA, 19 nt, Artificial Sequence
  Antisense Oligo
guauucaacuugcuggacg

SEQ ID NO: 60185 - RNA, 19 nt, Artificial Sequence
  Sense Oligo
guccagcaaguugaauaca

SEQ ID NO: 60186 - RNA, 19 nt, Artificial Sequence
  Antisense Oligo
uguauucaacuugcuggac

SEQ ID NO: 60187 - RNA, 19 nt, Artificial Sequence
  Sense Oligo
uccagcaaguugaauacag

SEQ ID NO: 60188 - RNA, 19 nt, Artificial Sequence
  Antisense Oligo
cuguauucaacuugcugga

SEQ ID NO: 60189 - RNA, 19 nt, Artificial Sequence
  Sense Oligo
ccagcaaguugaauacagc

SEQ ID NO: 60190 - RNA, 19 nt, Artificial Sequence
  Antisense Oligo
gcuguauucaacuugcugg

SEQ ID NO: 60191 - RNA, 19 nt, Artificial Sequence
  Sense Oligo
cagcaaguugaauacagcu

SEQ ID NO: 60192 - RNA, 19 nt, Artificial Sequence
  Antisense Oligo
agcuguauucaacuugcug

SEQ ID NO: 60193 - RNA, 19 nt, Artificial Sequence
  Sense Oligo
agcaaguugaauacagcuc

SEQ ID NO: 60194 - RNA, 19 nt, Artificial Sequence
  Antisense Oligo
gagcuguauucaacuugcu

SEQ ID NO: 60195 - RNA, 19 nt, Artificial Sequence
  Sense Oligo
gcaaguugaauacagcucc

SEQ ID NO: 60196 - RNA, 19 nt, Artificial Sequence
  Antisense Oligo
ggagcuguauucaacuugc

SEQ ID NO: 60197 - RNA, 19 nt, Artificial Sequence
  Sense Oligo
caaguugaauacagcucca

SEQ ID NO: 60198 - RNA, 19 nt, Artificial Sequence
  Antisense Oligo
uggagcuguauucaacuug

SEQ ID NO: 60199 - RNA, 19 nt, Artificial Sequence
  Sense Oligo
uacagcuccaucagaggcu

SEQ ID NO: 60200 - RNA, 19 nt, Artificial Sequence
  Antisense Oligo
agccucugauggagcugua

SEQ ID NO: 60201 - RNA, 19 nt, Artificial Sequence
  Sense Oligo
acagcuccaucagaggcuu

SEQ ID NO: 60202 - RNA, 19 nt, Artificial Sequence
  Antisense Oligo
aagccucugauggagcugu

SEQ ID NO: 60203 - RNA, 19 nt, Artificial Sequence
  Sense Oligo
cagcuccaucagaggcuuc

SEQ ID NO: 60204 - RNA, 19 nt, Artificial Sequence
  Antisense Oligo
gaagccucugauggagcug

SEQ ID NO: 60205 - RNA, 19 nt, Artificial Sequence
  Sense Oligo
agcuccaucagaggcuucc

SEQ ID NO: 60206 - RNA, 19 nt, Artificial Sequence
  Antisense Oligo
ggaagccucugauggagcu

SEQ ID NO: 60207 - RNA, 19 nt, Artificial Sequence
  Sense Oligo
acagcucagguguggcucu

SEQ ID NO: 60208 - RNA, 19 nt, Artificial Sequence
  Antisense Oligo
agagccacaccugagcugu

SEQ ID NO: 60209 - RNA, 19 nt, Artificial Sequence
  Sense Oligo
cagcucagguguggcucug

SEQ ID NO: 60210 - RNA, 19 nt, Artificial Sequence
  Antisense Oligo
cagagccacaccugagcug

SEQ ID NO: 60211 - RNA, 19 nt, Artificial Sequence
  Sense Oligo
ucagguguggcucugcucu

SEQ ID NO: 60212 - RNA, 19 nt, Artificial Sequence
  Antisense Oligo
agagcagagccacaccuga

SEQ ID NO: 60213 - RNA, 19 nt, Artificial Sequence
  Sense Oligo
cagguguggcucugcucug

SEQ ID NO: 60214 - RNA, 19 nt, Artificial Sequence
  Antisense Oligo
cagagcagagccacaccug

SEQ ID NO: 60215 - RNA, 19 nt, Artificial Sequence
  Sense Oligo
agguguggcucugcucuga

SEQ ID NO: 60216 - RNA, 19 nt, Artificial Sequence
  Antisense Oligo
ucagagcagagccacaccu

SEQ ID NO: 60217 - RNA, 19 nt, Artificial Sequence
  Sense Oligo
gguguggcucugcucugac

SEQ ID NO: 60218 - RNA, 19 nt, Artificial Sequence
  Antisense Oligo
gucagagcagagccacacc

SEQ ID NO: 60219 - RNA, 19 nt, Artificial Sequence
  Sense Oligo
guguggcucugcucugaca

SEQ ID NO: 60220 - RNA, 19 nt, Artificial Sequence
  Antisense Oligo
ugucagagcagagccacac

SEQ ID NO: 60221 - RNA, 19 nt, Artificial Sequence
  Sense Oligo
uguggcucugcucugacag

SEQ ID NO: 60222 - RNA, 19 nt, Artificial Sequence
  Antisense Oligo
cugucagagcagagccaca

SEQ ID NO: 60223 - RNA, 19 nt, Artificial Sequence
  Sense Oligo
guggcucugcucugacagg

SEQ ID NO: 60224 - RNA, 19 nt, Artificial Sequence
  Antisense Oligo
ccugucagagcagagccac

SEQ ID NO: 60225 - RNA, 19 nt, Artificial Sequence
  Sense Oligo
ggcucugcucugacaggac

SEQ ID NO: 60226 - RNA, 19 nt, Artificial Sequence
  Antisense Oligo
guccugucagagcagagcc

SEQ ID NO: 60227 - RNA, 19 nt, Artificial Sequence
  Sense Oligo
gcucugcucugacaggacc

SEQ ID NO: 60228 - RNA, 19 nt, Artificial Sequence
  Antisense Oligo
gguccugucagagcagagc

SEQ ID NO: 60229 - RNA, 19 nt, Artificial Sequence
  Sense Oligo
cucugcucugacaggacca

SEQ ID NO: 60230 - RNA, 19 nt, Artificial Sequence
  Antisense Oligo
ugguccugucagagcagag

SEQ ID NO: 60231 - RNA, 19 nt, Artificial Sequence
  Sense Oligo
gcucugacaggaccaggac

SEQ ID NO: 60232 - RNA, 19 nt, Artificial Sequence
  Antisense Oligo
guccugguccugucagagc

SEQ ID NO: 60233 - RNA, 19 nt, Artificial Sequence
  Sense Oligo
cucugacaggaccaggacu

SEQ ID NO: 60234 - RNA, 19 nt, Artificial Sequence
  Antisense Oligo
aguccugguccugucagag

SEQ ID NO: 60235 - RNA, 19 nt, Artificial Sequence
  Sense Oligo
aaaggaucacugcauaggg

SEQ ID NO: 60236 - RNA, 19 nt, Artificial Sequence
  Antisense Oligo
cccuaugcagugauccuuu

SEQ ID NO: 60237 - RNA, 19 nt, Artificial Sequence
  Sense Oligo
gcgcugaugggugcucuau

SEQ ID NO: 60238 - RNA, 19 nt, Artificial Sequence
  Antisense Oligo
auagagcacccaucagcgc

SEQ ID NO: 60239 - RNA, 19 nt, Artificial Sequence
  Sense Oligo
cgcugaugggugcucuaua

SEQ ID NO: 60240 - RNA, 19 nt, Artificial Sequence
  Antisense Oligo
uauagagcacccaucagcg

SEQ ID NO: 60241 - RNA, 19 nt, Artificial Sequence
  Sense Oligo
gcugaugggugcucuauag

SEQ ID NO: 60242 - RNA, 19 nt, Artificial Sequence
  Antisense Oligo
cuauagagcacccaucagc

SEQ ID NO: 60243 - RNA, 19 nt, Artificial Sequence
  Sense Oligo
cugaugggugcucuauagc

SEQ ID NO: 60244 - RNA, 19 nt, Artificial Sequence
  Antisense Oligo
gcuauagagcacccaucag

SEQ ID NO: 60245 - RNA, 19 nt, Artificial Sequence
  Sense Oligo
ugaugggugcucuauagcc

SEQ ID NO: 60246 - RNA, 19 nt, Artificial Sequence
  Antisense Oligo
ggcuauagagcacccauca

SEQ ID NO: 60247 - RNA, 19 nt, Artificial Sequence
  Sense Oligo
gaugggugcucuauagccu

SEQ ID NO: 60248 - RNA, 19 nt, Artificial Sequence
  Antisense Oligo
aggcuauagagcacccauc

SEQ ID NO: 60249 - RNA, 19 nt, Artificial Sequence
  Sense Oligo
augggugcucuauagccua

SEQ ID NO: 60250 - RNA, 19 nt, Artificial Sequence
  Antisense Oligo
uaggcuauagagcacccau

SEQ ID NO: 60251 - RNA, 19 nt, Artificial Sequence
  Sense Oligo
ugggugcucuauagccuaa

SEQ ID NO: 60252 - RNA, 19 nt, Artificial Sequence
  Antisense Oligo
uuaggcuauagagcaccca

SEQ ID NO: 60253 - RNA, 19 nt, Artificial Sequence
  Sense Oligo
gggugcucuauagccuaag

SEQ ID NO: 60254 - RNA, 19 nt, Artificial Sequence
  Antisense Oligo
cuuaggcuauagagcaccc

SEQ ID NO: 60255 - RNA, 19 nt, Artificial Sequence
  Sense Oligo
ggugcucuauagccuaagc

SEQ ID NO: 60256 - RNA, 19 nt, Artificial Sequence
  Antisense Oligo
gcuuaggcuauagagcacc

SEQ ID NO: 60257 - RNA, 19 nt, Artificial Sequence
  Sense Oligo
gugcucuauagccuaagcc

SEQ ID NO: 60258 - RNA, 19 nt, Artificial Sequence
  Antisense Oligo
ggcuuaggcuauagagcac

SEQ ID NO: 60259 - RNA, 19 nt, Artificial Sequence
  Sense Oligo
ucuauagccuaagcccuua

SEQ ID NO: 60260 - RNA, 19 nt, Artificial Sequence
  Antisense Oligo
uaagggcuuaggcuauaga

SEQ ID NO: 60261 - RNA, 19 nt, Artificial Sequence
  Sense Oligo
cuauagccuaagcccuuac

SEQ ID NO: 60262 - RNA, 19 nt, Artificial Sequence
  Antisense Oligo
guaagggcuuaggcuauag

SEQ ID NO: 60263 - RNA, 19 nt, Artificial Sequence
  Sense Oligo
uauagccuaagcccuuacc

SEQ ID NO: 60264 - RNA, 19 nt, Artificial Sequence
  Antisense Oligo
gguaagggcuuaggcuaua

SEQ ID NO: 60265 - RNA, 19 nt, Artificial Sequence
  Sense Oligo
auagccuaagcccuuacca

SEQ ID NO: 60266 - RNA, 19 nt, Artificial Sequence
  Antisense Oligo
ugguaagggcuuaggcuau

SEQ ID NO: 60267 - RNA, 19 nt, Artificial Sequence
  Sense Oligo
uagccuaagcccuuaccau

SEQ ID NO: 60268 - RNA, 19 nt, Artificial Sequence
  Antisense Oligo
augguaagggcuuaggcua

SEQ ID NO: 60269 - RNA, 19 nt, Artificial Sequence
  Sense Oligo
agccuaagcccuuaccaug

SEQ ID NO: 60270 - RNA, 19 nt, Artificial Sequence
  Antisense Oligo
caugguaagggcuuaggcu

SEQ ID NO: 60271 - RNA, 19 nt, Artificial Sequence
  Sense Oligo
gccuaagcccuuaccaugc

SEQ ID NO: 60272 - RNA, 19 nt, Artificial Sequence
  Antisense Oligo
gcaugguaagggcuuaggc

SEQ ID NO: 60273 - RNA, 19 nt, Artificial Sequence
  Sense Oligo
ccuaagcccuuaccaugcg

SEQ ID NO: 60274 - RNA, 19 nt, Artificial Sequence
  Antisense Oligo
cgcaugguaagggcuuagg

SEQ ID NO: 60275 - RNA, 19 nt, Artificial Sequence
  Sense Oligo
cuaagcccuuaccaugcgg

SEQ ID NO: 60276 - RNA, 19 nt, Artificial Sequence
  Antisense Oligo
ccgcaugguaagggcuuag

SEQ ID NO: 60277 - RNA, 19 nt, Artificial Sequence
  Sense Oligo
uaagcccuuaccaugcggu

SEQ ID NO: 60278 - RNA, 19 nt, Artificial Sequence
  Antisense Oligo
accgcaugguaagggcuua

SEQ ID NO: 60279 - RNA, 19 nt, Artificial Sequence
  Sense Oligo
aagcccuuaccaugcggug

SEQ ID NO: 60280 - RNA, 19 nt, Artificial Sequence
  Antisense Oligo
caccgcaugguaagggcuu

SEQ ID NO: 60281 - RNA, 19 nt, Artificial Sequence
  Sense Oligo
agcccuuaccaugcgguga

SEQ ID NO: 60282 - RNA, 19 nt, Artificial Sequence
  Antisense Oligo
ucaccgcaugguaagggcu

SEQ ID NO: 60283 - RNA, 19 nt, Artificial Sequence
  Sense Oligo
gcccuuaccaugcggugaa

SEQ ID NO: 60284 - RNA, 19 nt, Artificial Sequence
  Antisense Oligo
uucaccgcaugguaagggc

SEQ ID NO: 60285 - RNA, 19 nt, Artificial Sequence
  Sense Oligo
cccuuaccaugcggugaag

SEQ ID NO: 60286 - RNA, 19 nt, Artificial Sequence
  Antisense Oligo
cuucaccgcaugguaaggg

SEQ ID NO: 60287 - RNA, 19 nt, Artificial Sequence
  Sense Oligo
ugcggugaagggugcuuga

SEQ ID NO: 60288 - RNA, 19 nt, Artificial Sequence
  Antisense Oligo
ucaagcacccuucaccgca

SEQ ID NO: 60289 - RNA, 19 nt, Artificial Sequence
  Sense Oligo
gcggugaagggugcuugaa

SEQ ID NO: 60290 - RNA, 19 nt, Artificial Sequence
  Antisense Oligo
uucaagcacccuucaccgc

SEQ ID NO: 60291 - RNA, 19 nt, Artificial Sequence
  Sense Oligo
acauauuagaagcuuucgc

SEQ ID NO: 60292 - RNA, 19 nt, Artificial Sequence
  Antisense Oligo
gcgaaagcuucuaauaugu

SEQ ID NO: 60293 - RNA, 19 nt, Artificial Sequence
  Sense Oligo
cauauuagaagcuuucgcc

SEQ ID NO: 60294 - RNA, 19 nt, Artificial Sequence
  Antisense Oligo
ggcgaaagcuucuaauaug

SEQ ID NO: 60295 - RNA, 19 nt, Artificial Sequence
  Sense Oligo
auauuagaagcuuucgcca

SEQ ID NO: 60296 - RNA, 19 nt, Artificial Sequence
  Antisense Oligo
uggcgaaagcuucuaauau

SEQ ID NO: 60297 - RNA, 19 nt, Artificial Sequence
  Sense Oligo
uauuagaagcuuucgccac

SEQ ID NO: 60298 - RNA, 19 nt, Artificial Sequence
  Antisense Oligo
guggcgaaagcuucuaaua

SEQ ID NO: 60299 - RNA, 19 nt, Artificial Sequence
  Sense Oligo
auuagaagcuuucgccaca

SEQ ID NO: 60300 - RNA, 19 nt, Artificial Sequence
  Antisense Oligo
uguggcgaaagcuucuaau

SEQ ID NO: 60301 - RNA, 19 nt, Artificial Sequence
  Sense Oligo
aaaagcaccucccucucua

SEQ ID NO: 60302 - RNA, 19 nt, Artificial Sequence
  Antisense Oligo
uagagagggaggugcuuuu

SEQ ID NO: 60303 - RNA, 19 nt, Artificial Sequence
  Sense Oligo
aaagcaccucccucucuag

SEQ ID NO: 60304 - RNA, 19 nt, Artificial Sequence
  Antisense Oligo
cuagagagggaggugcuuu

SEQ ID NO: 60305 - RNA, 19 nt, Artificial Sequence
  Sense Oligo
agcaccucccucucuagcu

SEQ ID NO: 60306 - RNA, 19 nt, Artificial Sequence
  Antisense Oligo
agcuagagagggaggugcu

SEQ ID NO: 60307 - RNA, 19 nt, Artificial Sequence
  Sense Oligo
gcaccucccucucuagcuc

SEQ ID NO: 60308 - RNA, 19 nt, Artificial Sequence
  Antisense Oligo
gagcuagagagggaggugc

SEQ ID NO: 60309 - RNA, 19 nt, Artificial Sequence
  Sense Oligo
aacucggcucacuccuuca

SEQ ID NO: 60310 - RNA, 19 nt, Artificial Sequence
  Antisense Oligo
ugaaggagugagccgaguu

SEQ ID NO: 60311 - RNA, 19 nt, Artificial Sequence
  Sense Oligo
acucggcucacuccuucaa

SEQ ID NO: 60312 - RNA, 19 nt, Artificial Sequence
  Antisense Oligo
uugaaggagugagccgagu

SEQ ID NO: 60313 - RNA, 19 nt, Artificial Sequence
  Sense Oligo
cucggcucacuccuucaaa

SEQ ID NO: 60314 - RNA, 19 nt, Artificial Sequence
  Antisense Oligo
uuugaaggagugagccgag

SEQ ID NO: 60315 - RNA, 19 nt, Artificial Sequence
  Sense Oligo
gcaccucagacaugcuugu

SEQ ID NO: 60316 - RNA, 19 nt, Artificial Sequence
  Antisense Oligo
acaagcaugucugaggugc

SEQ ID NO: 60317 - RNA, 19 nt, Artificial Sequence
  Sense Oligo
caccucagacaugcuugug

SEQ ID NO: 60318 - RNA, 19 nt, Artificial Sequence
  Antisense Oligo
cacaagcaugucugaggug

SEQ ID NO: 60319 - RNA, 19 nt, Artificial Sequence
  Sense Oligo
ucagacaugcuugugacug

SEQ ID NO: 60320 - RNA, 19 nt, Artificial Sequence
  Antisense Oligo
cagucacaagcaugucuga

SEQ ID NO: 60321 - RNA, 19 nt, Artificial Sequence
  Sense Oligo
agacaugcuugugacugca

SEQ ID NO: 60322 - RNA, 19 nt, Artificial Sequence
  Antisense Oligo
ugcagucacaagcaugucu

SEQ ID NO: 60323 - RNA, 19 nt, Artificial Sequence
  Sense Oligo
aaagaugggcucucggcag

SEQ ID NO: 60324 - RNA, 19 nt, Artificial Sequence
  Antisense Oligo
cugccgagagcccaucuuu

SEQ ID NO: 60325 - RNA, 19 nt, Artificial Sequence
  Sense Oligo
ucucggcagagcauguaac

SEQ ID NO: 60326 - RNA, 19 nt, Artificial Sequence
  Antisense Oligo
guuacaugcucugccgaga

SEQ ID NO: 60327 - RNA, 19 nt, Artificial Sequence
  Sense Oligo
cucggcagagcauguaacu

SEQ ID NO: 60328 - RNA, 19 nt, Artificial Sequence
  Antisense Oligo
aguuacaugcucugccgag

SEQ ID NO: 60329 - RNA, 19 nt, Artificial Sequence
  Sense Oligo
ucggcagagcauguaacua

SEQ ID NO: 60330 - RNA, 19 nt, Artificial Sequence
  Antisense Oligo
uaguuacaugcucugccga

SEQ ID NO: 60331 - RNA, 19 nt, Artificial Sequence
  Sense Oligo
cggcagagcauguaacuag

SEQ ID NO: 60332 - RNA, 19 nt, Artificial Sequence
  Antisense Oligo
cuaguuacaugcucugccg

SEQ ID NO: 60333 - RNA, 19 nt, Artificial Sequence
  Sense Oligo
ggcagagcauguaacuagg

SEQ ID NO: 60334 - RNA, 19 nt, Artificial Sequence
  Antisense Oligo
ccuaguuacaugcucugcc

SEQ ID NO: 60335 - RNA, 19 nt, Artificial Sequence
  Sense Oligo
gcagagcauguaacuaggg

SEQ ID NO: 60336 - RNA, 19 nt, Artificial Sequence
  Antisense Oligo
cccuaguuacaugcucugc

SEQ ID NO: 60337 - RNA, 19 nt, Artificial Sequence
  Sense Oligo
cagagcauguaacuagggu

SEQ ID NO: 60338 - RNA, 19 nt, Artificial Sequence
  Antisense Oligo
acccuaguuacaugcucug

SEQ ID NO: 60339 - RNA, 19 nt, Artificial Sequence
  Sense Oligo
gcauguaacuagggugguu

SEQ ID NO: 60340 - RNA, 19 nt, Artificial Sequence
  Antisense Oligo
aaccacccuaguuacaugc

SEQ ID NO: 60341 - RNA, 19 nt, Artificial Sequence
  Sense Oligo
cauguaacuagggugguuu

SEQ ID NO: 60342 - RNA, 19 nt, Artificial Sequence
  Antisense Oligo
aaaccacccuaguuacaug

SEQ ID NO: 60343 - RNA, 19 nt, Artificial Sequence
  Sense Oligo
uaacuagggugguuuggcc

SEQ ID NO: 60344 - RNA, 19 nt, Artificial Sequence
  Antisense Oligo
ggccaaaccacccuaguua

SEQ ID NO: 60345 - RNA, 19 nt, Artificial Sequence
  Sense Oligo
aacuagggugguuuggccc

SEQ ID NO: 60346 - RNA, 19 nt, Artificial Sequence
  Antisense Oligo
gggccaaaccacccuaguu

SEQ ID NO: 60347 - RNA, 19 nt, Artificial Sequence
  Sense Oligo
guucuuaccaaguauucug

SEQ ID NO: 60348 - RNA, 19 nt, Artificial Sequence
  Antisense Oligo
cagaauacuugguaagaac

SEQ ID NO: 60349 - RNA, 19 nt, Artificial Sequence
  Sense Oligo
uucuuaccaaguauucugu

SEQ ID NO: 60350 - RNA, 19 nt, Artificial Sequence
  Antisense Oligo
acagaauacuugguaagaa

SEQ ID NO: 60351 - RNA, 19 nt, Artificial Sequence
  Sense Oligo
ucuuaccaaguauucuguu

SEQ ID NO: 60352 - RNA, 19 nt, Artificial Sequence
  Antisense Oligo
aacagaauacuugguaaga

SEQ ID NO: 60353 - RNA, 19 nt, Artificial Sequence
  Sense Oligo
cuuaccaaguauucuguuc

SEQ ID NO: 60354 - RNA, 19 nt, Artificial Sequence
  Antisense Oligo
gaacagaauacuugguaag

SEQ ID NO: 60355 - RNA, 19 nt, Artificial Sequence
  Sense Oligo
uuaccaaguauucuguuca

SEQ ID NO: 60356 - RNA, 19 nt, Artificial Sequence
  Antisense Oligo
ugaacagaauacuugguaa

SEQ ID NO: 60357 - RNA, 19 nt, Artificial Sequence
  Sense Oligo
uaccaaguauucuguucaa

SEQ ID NO: 60358 - RNA, 19 nt, Artificial Sequence
  Antisense Oligo
uugaacagaauacuuggua

SEQ ID NO: 60359 - RNA, 19 nt, Artificial Sequence
  Sense Oligo
accaaguauucuguucaac

SEQ ID NO: 60360 - RNA, 19 nt, Artificial Sequence
  Antisense Oligo
guugaacagaauacuuggu

SEQ ID NO: 60361 - RNA, 19 nt, Artificial Sequence
  Sense Oligo
acagauggguugaggcagc

SEQ ID NO: 60362 - RNA, 19 nt, Artificial Sequence
  Antisense Oligo
gcugccucaacccaucugu

SEQ ID NO: 60363 - RNA, 19 nt, Artificial Sequence
  Sense Oligo
caggaucacagucuuucug

SEQ ID NO: 60364 - RNA, 19 nt, Artificial Sequence
  Antisense Oligo
cagaaagacugugauccug

SEQ ID NO: 60365 - RNA, 19 nt, Artificial Sequence
  Sense Oligo
aacgguuaguauccugucc

SEQ ID NO: 60366 - RNA, 19 nt, Artificial Sequence
  Antisense Oligo
ggacaggauacuaaccguu

SEQ ID NO: 60367 - RNA, 19 nt, Artificial Sequence
  Sense Oligo
acgguuaguauccuguccc

SEQ ID NO: 60368 - RNA, 19 nt, Artificial Sequence
  Antisense Oligo
gggacaggauacuaaccgu

SEQ ID NO: 60369 - RNA, 19 nt, Artificial Sequence
  Sense Oligo
cccuguaccacuaagcguu

SEQ ID NO: 60370 - RNA, 19 nt, Artificial Sequence
  Antisense Oligo
aacgcuuagugguacaggg

SEQ ID NO: 60371 - RNA, 19 nt, Artificial Sequence
  Sense Oligo
ccuguaccacuaagcguuc

SEQ ID NO: 60372 - RNA, 19 nt, Artificial Sequence
  Antisense Oligo
gaacgcuuagugguacagg

SEQ ID NO: 60373 - RNA, 19 nt, Artificial Sequence
  Sense Oligo
cuguaccacuaagcguucc

SEQ ID NO: 60374 - RNA, 19 nt, Artificial Sequence
  Antisense Oligo
ggaacgcuuagugguacag

SEQ ID NO: 60375 - RNA, 19 nt, Artificial Sequence
  Sense Oligo
uguaccacuaagcguucca

SEQ ID NO: 60376 - RNA, 19 nt, Artificial Sequence
  Antisense Oligo
uggaacgcuuagugguaca

SEQ ID NO: 60377 - RNA, 19 nt, Artificial Sequence
  Sense Oligo
guaccacuaagcguuccag

SEQ ID NO: 60378 - RNA, 19 nt, Artificial Sequence
  Antisense Oligo
cuggaacgcuuagugguac

SEQ ID NO: 60379 - RNA, 19 nt, Artificial Sequence
  Sense Oligo
uaccacuaagcguuccagg

SEQ ID NO: 60380 - RNA, 19 nt, Artificial Sequence
  Antisense Oligo
ccuggaacgcuuaguggua

SEQ ID NO: 60381 - RNA, 19 nt, Artificial Sequence
  Sense Oligo
accacuaagcguuccagga

SEQ ID NO: 60382 - RNA, 19 nt, Artificial Sequence
  Antisense Oligo
uccuggaacgcuuaguggu

SEQ ID NO: 60383 - RNA, 19 nt, Artificial Sequence
  Sense Oligo
ccacuaagcguuccaggag

SEQ ID NO: 60384 - RNA, 19 nt, Artificial Sequence
  Antisense Oligo
cuccuggaacgcuuagugg

SEQ ID NO: 60385 - RNA, 19 nt, Artificial Sequence
  Sense Oligo
aaagcucuucucgucagcc

SEQ ID NO: 60386 - RNA, 19 nt, Artificial Sequence
  Antisense Oligo
ggcugacgagaagagcuuu

SEQ ID NO: 60387 - RNA, 19 nt, Artificial Sequence
  Sense Oligo
cacccagcacuguguuugu

SEQ ID NO: 60388 - RNA, 19 nt, Artificial Sequence
  Antisense Oligo
acaaacacagugcugggug

SEQ ID NO: 60389 - RNA, 19 nt, Artificial Sequence
  Sense Oligo
cagcacuguguuuguuugu

SEQ ID NO: 60390 - RNA, 19 nt, Artificial Sequence
  Antisense Oligo
acaaacaaacacagugcug

SEQ ID NO: 60391 - RNA, 19 nt, Artificial Sequence
  Sense Oligo
agauggagucuugcucugu

SEQ ID NO: 60392 - RNA, 19 nt, Artificial Sequence
  Antisense Oligo
acagagcaagacuccaucu

SEQ ID NO: 60393 - RNA, 19 nt, Artificial Sequence
  Sense Oligo
gauggagucuugcucuguc

SEQ ID NO: 60394 - RNA, 19 nt, Artificial Sequence
  Antisense Oligo
gacagagcaagacuccauc

SEQ ID NO: 60395 - RNA, 19 nt, Artificial Sequence
  Sense Oligo
gagucuugcucugucgcca

SEQ ID NO: 60396 - RNA, 19 nt, Artificial Sequence
  Antisense Oligo
uggcgacagagcaagacuc

SEQ ID NO: 60397 - RNA, 19 nt, Artificial Sequence
  Sense Oligo
agucuugcucugucgccag

SEQ ID NO: 60398 - RNA, 19 nt, Artificial Sequence
  Antisense Oligo
cuggcgacagagcaagacu

SEQ ID NO: 60399 - RNA, 19 nt, Artificial Sequence
  Sense Oligo
gcaccaucucggcucacug

SEQ ID NO: 60400 - RNA, 19 nt, Artificial Sequence
  Antisense Oligo
cagugagccgagauggugc

SEQ ID NO: 60401 - RNA, 19 nt, Artificial Sequence
  Sense Oligo
caccaucucggcucacugc

SEQ ID NO: 60402 - RNA, 19 nt, Artificial Sequence
  Antisense Oligo
gcagugagccgagauggug

SEQ ID NO: 60403 - RNA, 19 nt, Artificial Sequence
  Sense Oligo
accaucucggcucacugca

SEQ ID NO: 60404 - RNA, 19 nt, Artificial Sequence
  Antisense Oligo
ugcagugagccgagauggu

SEQ ID NO: 60405 - RNA, 19 nt, Artificial Sequence
  Sense Oligo
ccaucucggcucacugcaa

SEQ ID NO: 60406 - RNA, 19 nt, Artificial Sequence
  Antisense Oligo
uugcagugagccgagaugg

SEQ ID NO: 60407 - RNA, 19 nt, Artificial Sequence
  Sense Oligo
caucucggcucacugcaac

SEQ ID NO: 60408 - RNA, 19 nt, Artificial Sequence
  Antisense Oligo
guugcagugagccgagaug

SEQ ID NO: 60409 - RNA, 19 nt, Artificial Sequence
  Sense Oligo
aucucggcucacugcaacc

SEQ ID NO: 60410 - RNA, 19 nt, Artificial Sequence
  Antisense Oligo
gguugcagugagccgagau

SEQ ID NO: 60411 - RNA, 19 nt, Artificial Sequence
  Sense Oligo
ucucggcucacugcaaccu

SEQ ID NO: 60412 - RNA, 19 nt, Artificial Sequence
  Antisense Oligo
agguugcagugagccgaga

SEQ ID NO: 60413 - RNA, 19 nt, Artificial Sequence
  Sense Oligo
caaccucugccucccggau

SEQ ID NO: 60414 - RNA, 19 nt, Artificial Sequence
  Antisense Oligo
auccgggaggcagagguug

SEQ ID NO: 60415 - RNA, 19 nt, Artificial Sequence
  Sense Oligo
aaccucugccucccggauu

SEQ ID NO: 60416 - RNA, 19 nt, Artificial Sequence
  Antisense Oligo
aauccgggaggcagagguu

SEQ ID NO: 60417 - RNA, 19 nt, Artificial Sequence
  Sense Oligo
accucugccucccggauuc

SEQ ID NO: 60418 - RNA, 19 nt, Artificial Sequence
  Antisense Oligo
gaauccgggaggcagaggu

SEQ ID NO: 60419 - RNA, 19 nt, Artificial Sequence
  Sense Oligo
ccucugccucccggauuca

SEQ ID NO: 60420 - RNA, 19 nt, Artificial Sequence
  Antisense Oligo
ugaauccgggaggcagagg

SEQ ID NO: 60421 - RNA, 19 nt, Artificial Sequence
  Sense Oligo
cggauucaagcaauucucc

SEQ ID NO: 60422 - RNA, 19 nt, Artificial Sequence
  Antisense Oligo
ggagaauugcuugaauccg

SEQ ID NO: 60423 - RNA, 19 nt, Artificial Sequence
  Sense Oligo
ggauucaagcaauucuccu

SEQ ID NO: 60424 - RNA, 19 nt, Artificial Sequence
  Antisense Oligo
aggagaauugcuugaaucc

SEQ ID NO: 60425 - RNA, 19 nt, Artificial Sequence
  Sense Oligo
gauucaagcaauucuccug

SEQ ID NO: 60426 - RNA, 19 nt, Artificial Sequence
  Antisense Oligo
caggagaauugcuugaauc

SEQ ID NO: 60427 - RNA, 19 nt, Artificial Sequence
  Sense Oligo
auucaagcaauucuccugc

SEQ ID NO: 60428 - RNA, 19 nt, Artificial Sequence
  Antisense Oligo
gcaggagaauugcuugaau

SEQ ID NO: 60429 - RNA, 19 nt, Artificial Sequence
  Sense Oligo
uucaagcaauucuccugcc

SEQ ID NO: 60430 - RNA, 19 nt, Artificial Sequence
  Antisense Oligo
ggcaggagaauugcuugaa

SEQ ID NO: 60431 - RNA, 19 nt, Artificial Sequence
  Sense Oligo
ucaagcaauucuccugccu

SEQ ID NO: 60432 - RNA, 19 nt, Artificial Sequence
  Antisense Oligo
aggcaggagaauugcuuga

SEQ ID NO: 60433 - RNA, 19 nt, Artificial Sequence
  Sense Oligo
agacaggguuucaccaugu

SEQ ID NO: 60434 - RNA, 19 nt, Artificial Sequence
  Antisense Oligo
acauggugaaacccugucu

SEQ ID NO: 60435 - RNA, 19 nt, Artificial Sequence
  Sense Oligo
gacaggguuucaccauguu

SEQ ID NO: 60436 - RNA, 19 nt, Artificial Sequence
  Antisense Oligo
aacauggugaaacccuguc

SEQ ID NO: 60437 - RNA, 19 nt, Artificial Sequence
  Sense Oligo
acaggguuucaccauguug

SEQ ID NO: 60438 - RNA, 19 nt, Artificial Sequence
  Antisense Oligo
caacauggugaaacccugu

SEQ ID NO: 60439 - RNA, 19 nt, Artificial Sequence
  Sense Oligo
caggguuucaccauguugc

SEQ ID NO: 60440 - RNA, 19 nt, Artificial Sequence
  Antisense Oligo
gcaacauggugaaacccug

SEQ ID NO: 60441 - RNA, 19 nt, Artificial Sequence
  Sense Oligo
aggguuucaccauguugcc

SEQ ID NO: 60442 - RNA, 19 nt, Artificial Sequence
  Antisense Oligo
ggcaacauggugaaacccu

SEQ ID NO: 60443 - RNA, 19 nt, Artificial Sequence
  Sense Oligo
ggguuucaccauguugccc

SEQ ID NO: 60444 - RNA, 19 nt, Artificial Sequence
  Antisense Oligo
gggcaacauggugaaaccc

SEQ ID NO: 60445 - RNA, 19 nt, Artificial Sequence
  Sense Oligo
gguuucaccauguugccca

SEQ ID NO: 60446 - RNA, 19 nt, Artificial Sequence
  Antisense Oligo
ugggcaacauggugaaacc

SEQ ID NO: 60447 - RNA, 19 nt, Artificial Sequence
  Sense Oligo
guuucaccauguugcccag

SEQ ID NO: 60448 - RNA, 19 nt, Artificial Sequence
  Antisense Oligo
cugggcaacauggugaaac

SEQ ID NO: 60449 - RNA, 19 nt, Artificial Sequence
  Sense Oligo
uuucaccauguugcccagg

SEQ ID NO: 60450 - RNA, 19 nt, Artificial Sequence
  Antisense Oligo
ccugggcaacauggugaaa

SEQ ID NO: 60451 - RNA, 19 nt, Artificial Sequence
  Sense Oligo
uucaccauguugcccaggc

SEQ ID NO: 60452 - RNA, 19 nt, Artificial Sequence
  Antisense Oligo
gccugggcaacauggugaa

SEQ ID NO: 60453 - RNA, 19 nt, Artificial Sequence
  Sense Oligo
ucaccauguugcccaggcu

SEQ ID NO: 60454 - RNA, 19 nt, Artificial Sequence
  Antisense Oligo
agccugggcaacaugguga

SEQ ID NO: 60455 - RNA, 19 nt, Artificial Sequence
  Sense Oligo
caccauguugcccaggcug

SEQ ID NO: 60456 - RNA, 19 nt, Artificial Sequence
  Antisense Oligo
cagccugggcaacauggug

SEQ ID NO: 60457 - RNA, 19 nt, Artificial Sequence
  Sense Oligo
accauguugcccaggcugg

SEQ ID NO: 60458 - RNA, 19 nt, Artificial Sequence
  Antisense Oligo
ccagccugggcaacauggu

SEQ ID NO: 60459 - RNA, 19 nt, Artificial Sequence
  Sense Oligo
ccauguugcccaggcuggu

SEQ ID NO: 60460 - RNA, 19 nt, Artificial Sequence
  Antisense Oligo
accagccugggcaacaugg

SEQ ID NO: 60461 - RNA, 19 nt, Artificial Sequence
  Sense Oligo
cauguugcccaggcugguc

SEQ ID NO: 60462 - RNA, 19 nt, Artificial Sequence
  Antisense Oligo
gaccagccugggcaacaug

SEQ ID NO: 60463 - RNA, 19 nt, Artificial Sequence
  Sense Oligo
auguugcccaggcuggucu

SEQ ID NO: 60464 - RNA, 19 nt, Artificial Sequence
  Antisense Oligo
agaccagccugggcaacau

SEQ ID NO: 60465 - RNA, 19 nt, Artificial Sequence
  Sense Oligo
uguugcccaggcuggucuc

SEQ ID NO: 60466 - RNA, 19 nt, Artificial Sequence
  Antisense Oligo
gagaccagccugggcaaca

SEQ ID NO: 60467 - RNA, 19 nt, Artificial Sequence
  Sense Oligo
guugcccaggcuggucuca

SEQ ID NO: 60468 - RNA, 19 nt, Artificial Sequence
  Antisense Oligo
ugagaccagccugggcaac

SEQ ID NO: 60469 - RNA, 19 nt, Artificial Sequence
  Sense Oligo
uugcccaggcuggucucaa

SEQ ID NO: 60470 - RNA, 19 nt, Artificial Sequence
  Antisense Oligo
uugagaccagccugggcaa

SEQ ID NO: 60471 - RNA, 19 nt, Artificial Sequence
  Sense Oligo
ugcccaggcuggucucaaa

SEQ ID NO: 60472 - RNA, 19 nt, Artificial Sequence
  Antisense Oligo
uuugagaccagccugggca

SEQ ID NO: 60473 - RNA, 19 nt, Artificial Sequence
  Sense Oligo
cucggccucccaaagugcu

SEQ ID NO: 60474 - RNA, 19 nt, Artificial Sequence
  Antisense Oligo
agcacuuugggaggccgag

SEQ ID NO: 60475 - RNA, 19 nt, Artificial Sequence
  Sense Oligo
ucggccucccaaagugcua

SEQ ID NO: 60476 - RNA, 19 nt, Artificial Sequence
  Antisense Oligo
uagcacuuugggaggccga

SEQ ID NO: 60477 - RNA, 19 nt, Artificial Sequence
  Sense Oligo
cggccucccaaagugcuag

SEQ ID NO: 60478 - RNA, 19 nt, Artificial Sequence
  Antisense Oligo
cuagcacuuugggaggccg

SEQ ID NO: 60479 - RNA, 19 nt, Artificial Sequence
  Sense Oligo
ggccucccaaagugcuagg

SEQ ID NO: 60480 - RNA, 19 nt, Artificial Sequence
  Antisense Oligo
ccuagcacuuugggaggcc

SEQ ID NO: 60481 - RNA, 19 nt, Artificial Sequence
  Sense Oligo
gccucccaaagugcuagga

SEQ ID NO: 60482 - RNA, 19 nt, Artificial Sequence
  Antisense Oligo
uccuagcacuuugggaggc

SEQ ID NO: 60483 - RNA, 19 nt, Artificial Sequence
  Sense Oligo
ccucccaaagugcuaggau

SEQ ID NO: 60484 - RNA, 19 nt, Artificial Sequence
  Antisense Oligo
auccuagcacuuugggagg

SEQ ID NO: 60485 - RNA, 19 nt, Artificial Sequence
  Sense Oligo
cucccaaagugcuaggauu

SEQ ID NO: 60486 - RNA, 19 nt, Artificial Sequence
  Antisense Oligo
aauccuagcacuuugggag

SEQ ID NO: 60487 - RNA, 19 nt, Artificial Sequence
  Sense Oligo
ucccaaagugcuaggauua

SEQ ID NO: 60488 - RNA, 19 nt, Artificial Sequence
  Antisense Oligo
uaauccuagcacuuuggga

SEQ ID NO: 60489 - RNA, 19 nt, Artificial Sequence
  Sense Oligo
cccaaagugcuaggauuac

SEQ ID NO: 60490 - RNA, 19 nt, Artificial Sequence
  Antisense Oligo
guaauccuagcacuuuggg

SEQ ID NO: 60491 - RNA, 19 nt, Artificial Sequence
  Sense Oligo
ccaaagugcuaggauuaca

SEQ ID NO: 60492 - RNA, 19 nt, Artificial Sequence
  Antisense Oligo
uguaauccuagcacuuugg

SEQ ID NO: 60493 - RNA, 19 nt, Artificial Sequence
  Sense Oligo
cuuaacuugugucucuuuu

SEQ ID NO: 60494 - RNA, 19 nt, Artificial Sequence
  Antisense Oligo
aaaagagacacaaguuaag

SEQ ID NO: 60495 - RNA, 19 nt, Artificial Sequence
  Sense Oligo
uuaacuugugucucuuuug

SEQ ID NO: 60496 - RNA, 19 nt, Artificial Sequence
  Antisense Oligo
caaaagagacacaaguuaa

SEQ ID NO: 60497 - RNA, 19 nt, Artificial Sequence
  Sense Oligo
uaacuugugucucuuuuga

SEQ ID NO: 60498 - RNA, 19 nt, Artificial Sequence
  Antisense Oligo
ucaaaagagacacaaguua

SEQ ID NO: 60499 - RNA, 19 nt, Artificial Sequence
  Sense Oligo
aacuugugucucuuuugau

SEQ ID NO: 60500 - RNA, 19 nt, Artificial Sequence
  Antisense Oligo
aucaaaagagacacaaguu

SEQ ID NO: 60501 - RNA, 19 nt, Artificial Sequence
  Sense Oligo
cuugugucucuuuugaugg

SEQ ID NO: 60502 - RNA, 19 nt, Artificial Sequence
  Antisense Oligo
ccaucaaaagagacacaag

SEQ ID NO: 60503 - RNA, 19 nt, Artificial Sequence
  Sense Oligo
uugugucucuuuugauggu

SEQ ID NO: 60504 - RNA, 19 nt, Artificial Sequence
  Antisense Oligo
accaucaaaagagacacaa

SEQ ID NO: 60505 - RNA, 19 nt, Artificial Sequence
  Sense Oligo
ugugucucuuuugauggug

SEQ ID NO: 60506 - RNA, 19 nt, Artificial Sequence
  Antisense Oligo
caccaucaaaagagacaca

SEQ ID NO: 60507 - RNA, 19 nt, Artificial Sequence
  Sense Oligo
gugucucuuuugauggugg

SEQ ID NO: 60508 - RNA, 19 nt, Artificial Sequence
  Antisense Oligo
ccaccaucaaaagagacac

SEQ ID NO: 60509 - RNA, 19 nt, Artificial Sequence
  Sense Oligo
gucucuuuugaugguggug

SEQ ID NO: 60510 - RNA, 19 nt, Artificial Sequence
  Antisense Oligo
caccaccaucaaaagagac

SEQ ID NO: 60511 - RNA, 19 nt, Artificial Sequence
  Sense Oligo
cucuuuugauggugguguc

SEQ ID NO: 60512 - RNA, 19 nt, Artificial Sequence
  Antisense Oligo
gacaccaccaucaaaagag

SEQ ID NO: 60513 - RNA, 19 nt, Artificial Sequence
  Sense Oligo
ucuuuugaugguggugucu

SEQ ID NO: 60514 - RNA, 19 nt, Artificial Sequence
  Antisense Oligo
agacaccaccaucaaaaga

SEQ ID NO: 60515 - RNA, 19 nt, Artificial Sequence
  Sense Oligo
uuugaugguggugucugga

SEQ ID NO: 60516 - RNA, 19 nt, Artificial Sequence
  Antisense Oligo
uccagacaccaccaucaaa

SEQ ID NO: 60517 - RNA, 19 nt, Artificial Sequence
  Sense Oligo
augguggugucuggauaag

SEQ ID NO: 60518 - RNA, 19 nt, Artificial Sequence
  Antisense Oligo
cuuauccagacaccaccau

SEQ ID NO: 60519 - RNA, 19 nt, Artificial Sequence
  Sense Oligo
ugguggugucuggauaagu

SEQ ID NO: 60520 - RNA, 19 nt, Artificial Sequence
  Antisense Oligo
acuuauccagacaccacca

SEQ ID NO: 60521 - RNA, 19 nt, Artificial Sequence
  Sense Oligo
gguggugucuggauaagua

SEQ ID NO: 60522 - RNA, 19 nt, Artificial Sequence
  Antisense Oligo
uacuuauccagacaccacc

SEQ ID NO: 60523 - RNA, 19 nt, Artificial Sequence
  Sense Oligo
guggugucuggauaaguaa

SEQ ID NO: 60524 - RNA, 19 nt, Artificial Sequence
  Antisense Oligo
uuacuuauccagacaccac

SEQ ID NO: 60525 - RNA, 19 nt, Artificial Sequence
  Sense Oligo
uggugucuggauaaguaaa

SEQ ID NO: 60526 - RNA, 19 nt, Artificial Sequence
  Antisense Oligo
uuuacuuauccagacacca

SEQ ID NO: 60527 - RNA, 19 nt, Artificial Sequence
  Sense Oligo
ggugucuggauaaguaaaa

SEQ ID NO: 60528 - RNA, 19 nt, Artificial Sequence
  Antisense Oligo
uuuuacuuauccagacacc

SEQ ID NO: 60529 - RNA, 19 nt, Artificial Sequence
  Sense Oligo
gugucuggauaaguaaaau

SEQ ID NO: 60530 - RNA, 19 nt, Artificial Sequence
  Antisense Oligo
auuuuacuuauccagacac

SEQ ID NO: 60531 - RNA, 19 nt, Artificial Sequence
  Sense Oligo
cccucaguacucuucaguc

SEQ ID NO: 60532 - RNA, 19 nt, Artificial Sequence
  Antisense Oligo
gacugaagaguacugaggg

SEQ ID NO: 60533 - RNA, 19 nt, Artificial Sequence
  Sense Oligo
ccucaguacucuucagucc

SEQ ID NO: 60534 - RNA, 19 nt, Artificial Sequence
  Antisense Oligo
ggacugaagaguacugagg

SEQ ID NO: 60535 - RNA, 19 nt, Artificial Sequence
  Sense Oligo
cucaguacucuucaguccc

SEQ ID NO: 60536 - RNA, 19 nt, Artificial Sequence
  Antisense Oligo
gggacugaagaguacugag

SEQ ID NO: 60537 - RNA, 19 nt, Artificial Sequence
  Sense Oligo
ucaguacucuucagucccu

SEQ ID NO: 60538 - RNA, 19 nt, Artificial Sequence
  Antisense Oligo
agggacugaagaguacuga

SEQ ID NO: 60539 - RNA, 19 nt, Artificial Sequence
  Sense Oligo
caguacucuucagucccua

SEQ ID NO: 60540 - RNA, 19 nt, Artificial Sequence
  Antisense Oligo
uagggacugaagaguacug

SEQ ID NO: 60541 - RNA, 19 nt, Artificial Sequence
  Sense Oligo
aguacucuucagucccuaa

SEQ ID NO: 60542 - RNA, 19 nt, Artificial Sequence
  Antisense Oligo
uuagggacugaagaguacu

SEQ ID NO: 60543 - RNA, 19 nt, Artificial Sequence
  Sense Oligo
guacucuucagucccuaaa

SEQ ID NO: 60544 - RNA, 19 nt, Artificial Sequence
  Antisense Oligo
uuuagggacugaagaguac

SEQ ID NO: 60545 - RNA, 19 nt, Artificial Sequence
  Sense Oligo
ucuucagucccuaaauaug

SEQ ID NO: 60546 - RNA, 19 nt, Artificial Sequence
  Antisense Oligo
cauauuuagggacugaaga

SEQ ID NO: 60547 - RNA, 19 nt, Artificial Sequence
  Sense Oligo
cuucagucccuaaauaugg

SEQ ID NO: 60548 - RNA, 19 nt, Artificial Sequence
  Antisense Oligo
ccauauuuagggacugaag

SEQ ID NO: 60549 - RNA, 19 nt, Artificial Sequence
  Sense Oligo
uucagucccuaaauauggc

SEQ ID NO: 60550 - RNA, 19 nt, Artificial Sequence
  Antisense Oligo
gccauauuuagggacugaa

SEQ ID NO: 60551 - RNA, 19 nt, Artificial Sequence
  Sense Oligo
ucagucccuaaauauggca

SEQ ID NO: 60552 - RNA, 19 nt, Artificial Sequence
  Antisense Oligo
ugccauauuuagggacuga

SEQ ID NO: 60553 - RNA, 19 nt, Artificial Sequence
  Sense Oligo
cagucccuaaauauggcau

SEQ ID NO: 60554 - RNA, 19 nt, Artificial Sequence
  Antisense Oligo
augccauauuuagggacug

SEQ ID NO: 60555 - RNA, 19 nt, Artificial Sequence
  Sense Oligo
agucccuaaauauggcauc

SEQ ID NO: 60556 - RNA, 19 nt, Artificial Sequence
  Antisense Oligo
gaugccauauuuagggacu

SEQ ID NO: 60557 - RNA, 19 nt, Artificial Sequence
  Sense Oligo
gucccuaaauauggcauca

SEQ ID NO: 60558 - RNA, 19 nt, Artificial Sequence
  Antisense Oligo
ugaugccauauuuagggac

SEQ ID NO: 60559 - RNA, 19 nt, Artificial Sequence
  Sense Oligo
ucccuaaauauggcaucaa

SEQ ID NO: 60560 - RNA, 19 nt, Artificial Sequence
  Antisense Oligo
uugaugccauauuuaggga

SEQ ID NO: 60561 - RNA, 19 nt, Artificial Sequence
  Sense Oligo
cccuaaauauggcaucaaa

SEQ ID NO: 60562 - RNA, 19 nt, Artificial Sequence
  Antisense Oligo
uuugaugccauauuuaggg

SEQ ID NO: 60563 - RNA, 19 nt, Artificial Sequence
  Sense Oligo
ccuaaauauggcaucaaaa

SEQ ID NO: 60564 - RNA, 19 nt, Artificial Sequence
  Antisense Oligo
uuuugaugccauauuuagg

SEQ ID NO: 60565 - RNA, 19 nt, Artificial Sequence
  Sense Oligo
cuaaauauggcaucaaaag

SEQ ID NO: 60566 - RNA, 19 nt, Artificial Sequence
  Antisense Oligo
cuuuugaugccauauuuag

SEQ ID NO: 60567 - RNA, 19 nt, Artificial Sequence
  Sense Oligo
uggcaucaaaagggagcug

SEQ ID NO: 60568 - RNA, 19 nt, Artificial Sequence
  Antisense Oligo
cagcucccuuuugaugcca

SEQ ID NO: 60569 - RNA, 19 nt, Artificial Sequence
  Sense Oligo
ggcaucaaaagggagcuga

SEQ ID NO: 60570 - RNA, 19 nt, Artificial Sequence
  Antisense Oligo
ucagcucccuuuugaugcc

SEQ ID NO: 60571 - RNA, 19 nt, Artificial Sequence
  Sense Oligo
gcaucaaaagggagcugaa

SEQ ID NO: 60572 - RNA, 19 nt, Artificial Sequence
  Antisense Oligo
uucagcucccuuuugaugc

SEQ ID NO: 60573 - RNA, 19 nt, Artificial Sequence
  Sense Oligo
cggcuguguguggagcuga

SEQ ID NO: 60574 - RNA, 19 nt, Artificial Sequence
  Antisense Oligo
ucagcuccacacacagccg

SEQ ID NO: 60575 - RNA, 19 nt, Artificial Sequence
  Sense Oligo
uguguguggagcugauggc

SEQ ID NO: 60576 - RNA, 19 nt, Artificial Sequence
  Antisense Oligo
gccaucagcuccacacaca

SEQ ID NO: 60577 - RNA, 19 nt, Artificial Sequence
  Sense Oligo
guguguggagcugauggcu

SEQ ID NO: 60578 - RNA, 19 nt, Artificial Sequence
  Antisense Oligo
agccaucagcuccacacac

SEQ ID NO: 60579 - RNA, 19 nt, Artificial Sequence
  Sense Oligo
uguguggagcugauggcuu

SEQ ID NO: 60580 - RNA, 19 nt, Artificial Sequence
  Antisense Oligo
aagccaucagcuccacaca

SEQ ID NO: 60581 - RNA, 19 nt, Artificial Sequence
  Sense Oligo
guguggagcugauggcuuc

SEQ ID NO: 60582 - RNA, 19 nt, Artificial Sequence
  Antisense Oligo
gaagccaucagcuccacac

SEQ ID NO: 60583 - RNA, 19 nt, Artificial Sequence
  Sense Oligo
uguggagcugauggcuucu

SEQ ID NO: 60584 - RNA, 19 nt, Artificial Sequence
  Antisense Oligo
agaagccaucagcuccaca

SEQ ID NO: 60585 - RNA, 19 nt, Artificial Sequence
  Sense Oligo
guggagcugauggcuucug

SEQ ID NO: 60586 - RNA, 19 nt, Artificial Sequence
  Antisense Oligo
cagaagccaucagcuccac

SEQ ID NO: 60587 - RNA, 19 nt, Artificial Sequence
  Sense Oligo
uggagcugauggcuucugc

SEQ ID NO: 60588 - RNA, 19 nt, Artificial Sequence
  Antisense Oligo
gcagaagccaucagcucca

SEQ ID NO: 60589 - RNA, 19 nt, Artificial Sequence
  Sense Oligo
ggagcugauggcuucugca

SEQ ID NO: 60590 - RNA, 19 nt, Artificial Sequence
  Antisense Oligo
ugcagaagccaucagcucc

SEQ ID NO: 60591 - RNA, 19 nt, Artificial Sequence
  Sense Oligo
gagcugauggcuucugcau

SEQ ID NO: 60592 - RNA, 19 nt, Artificial Sequence
  Antisense Oligo
augcagaagccaucagcuc

SEQ ID NO: 60593 - RNA, 19 nt, Artificial Sequence
  Sense Oligo
aacuccucucugcuuaagc

SEQ ID NO: 60594 - RNA, 19 nt, Artificial Sequence
  Antisense Oligo
gcuuaagcagagaggaguu

SEQ ID NO: 60595 - RNA, 19 nt, Artificial Sequence
  Sense Oligo
acuccucucugcuuaagca

SEQ ID NO: 60596 - RNA, 19 nt, Artificial Sequence
  Antisense Oligo
ugcuuaagcagagaggagu

SEQ ID NO: 60597 - RNA, 19 nt, Artificial Sequence
  Sense Oligo
cuccucucugcuuaagcau

SEQ ID NO: 60598 - RNA, 19 nt, Artificial Sequence
  Antisense Oligo
augcuuaagcagagaggag

SEQ ID NO: 60599 - RNA, 19 nt, Artificial Sequence
  Sense Oligo
ccucucugcuuaagcauaa

SEQ ID NO: 60600 - RNA, 19 nt, Artificial Sequence
  Antisense Oligo
uuaugcuuaagcagagagg

SEQ ID NO: 60601 - RNA, 19 nt, Artificial Sequence
  Sense Oligo
cucucugcuuaagcauaac

SEQ ID NO: 60602 - RNA, 19 nt, Artificial Sequence
  Antisense Oligo
guuaugcuuaagcagagag

SEQ ID NO: 60603 - RNA, 19 nt, Artificial Sequence
  Sense Oligo
ucucugcuuaagcauaacc

SEQ ID NO: 60604 - RNA, 19 nt, Artificial Sequence
  Antisense Oligo
gguuaugcuuaagcagaga

SEQ ID NO: 60605 - RNA, 19 nt, Artificial Sequence
  Sense Oligo
cucugcuuaagcauaaccc

SEQ ID NO: 60606 - RNA, 19 nt, Artificial Sequence
  Antisense Oligo
ggguuaugcuuaagcagag

SEQ ID NO: 60607 - RNA, 19 nt, Artificial Sequence
  Sense Oligo
gcuuaagcauaacccuguc

SEQ ID NO: 60608 - RNA, 19 nt, Artificial Sequence
  Antisense Oligo
gacaggguuaugcuuaagc

SEQ ID NO: 60609 - RNA, 19 nt, Artificial Sequence
  Sense Oligo
aagcauaacccugucguuu

SEQ ID NO: 60610 - RNA, 19 nt, Artificial Sequence
  Antisense Oligo
aaacgacaggguuaugcuu

SEQ ID NO: 60611 - RNA, 19 nt, Artificial Sequence
  Sense Oligo
agcauaacccugucguuua

SEQ ID NO: 60612 - RNA, 19 nt, Artificial Sequence
  Antisense Oligo
uaaacgacaggguuaugcu

SEQ ID NO: 60613 - RNA, 19 nt, Artificial Sequence
  Sense Oligo
gcauaacccugucguuuaa

SEQ ID NO: 60614 - RNA, 19 nt, Artificial Sequence
  Antisense Oligo
uuaaacgacaggguuaugc

SEQ ID NO: 60615 - RNA, 19 nt, Artificial Sequence
  Sense Oligo
cauaacccugucguuuaaa

SEQ ID NO: 60616 - RNA, 19 nt, Artificial Sequence
  Antisense Oligo
uuuaaacgacaggguuaug

SEQ ID NO: 60617 - RNA, 19 nt, Artificial Sequence
  Sense Oligo
auaacccugucguuuaaag

SEQ ID NO: 60618 - RNA, 19 nt, Artificial Sequence
  Antisense Oligo
cuuuaaacgacaggguuau

SEQ ID NO: 60619 - RNA, 19 nt, Artificial Sequence
  Sense Oligo
uaacccugucguuuaaagg

SEQ ID NO: 60620 - RNA, 19 nt, Artificial Sequence
  Antisense Oligo
ccuuuaaacgacaggguua

SEQ ID NO: 60621 - RNA, 19 nt, Artificial Sequence
  Sense Oligo
aacccugucguuuaaaggu

SEQ ID NO: 60622 - RNA, 19 nt, Artificial Sequence
  Antisense Oligo
accuuuaaacgacaggguu

SEQ ID NO: 60623 - RNA, 19 nt, Artificial Sequence
  Sense Oligo
acccugucguuuaaaggug

SEQ ID NO: 60624 - RNA, 19 nt, Artificial Sequence
  Antisense Oligo
caccuuuaaacgacagggu

SEQ ID NO: 60625 - RNA, 19 nt, Artificial Sequence
  Sense Oligo
cccugucguuuaaagguga

SEQ ID NO: 60626 - RNA, 19 nt, Artificial Sequence
  Antisense Oligo
ucaccuuuaaacgacaggg

SEQ ID NO: 60627 - RNA, 19 nt, Artificial Sequence
  Sense Oligo
ccugucguuuaaaggugag

SEQ ID NO: 60628 - RNA, 19 nt, Artificial Sequence
  Antisense Oligo
cucaccuuuaaacgacagg

SEQ ID NO: 60629 - RNA, 19 nt, Artificial Sequence
  Sense Oligo
caaccuacccaaagacuac

SEQ ID NO: 60630 - RNA, 19 nt, Artificial Sequence
  Antisense Oligo
guagucuuuggguagguug

SEQ ID NO: 60631 - RNA, 19 nt, Artificial Sequence
  Sense Oligo
aaccuacccaaagacuacu

SEQ ID NO: 60632 - RNA, 19 nt, Artificial Sequence
  Antisense Oligo
aguagucuuuggguagguu

SEQ ID NO: 60633 - RNA, 19 nt, Artificial Sequence
  Sense Oligo
ccaaagacuacugcagcac

SEQ ID NO: 60634 - RNA, 19 nt, Artificial Sequence
  Antisense Oligo
gugcugcaguagucuuugg

SEQ ID NO: 60635 - RNA, 19 nt, Artificial Sequence
  Sense Oligo
cugcagcacugacuuggau

SEQ ID NO: 60636 - RNA, 19 nt, Artificial Sequence
  Antisense Oligo
auccaagucagugcugcag

SEQ ID NO: 60637 - RNA, 19 nt, Artificial Sequence
  Sense Oligo
ugcagcacugacuuggauc

SEQ ID NO: 60638 - RNA, 19 nt, Artificial Sequence
  Antisense Oligo
gauccaagucagugcugca

SEQ ID NO: 60639 - RNA, 19 nt, Artificial Sequence
  Sense Oligo
gcagcacugacuuggaucu

SEQ ID NO: 60640 - RNA, 19 nt, Artificial Sequence
  Antisense Oligo
agauccaagucagugcugc

SEQ ID NO: 60641 - RNA, 19 nt, Artificial Sequence
  Sense Oligo
cagcacugacuuggaucug

SEQ ID NO: 60642 - RNA, 19 nt, Artificial Sequence
  Antisense Oligo
cagauccaagucagugcug

SEQ ID NO: 60643 - RNA, 19 nt, Artificial Sequence
  Sense Oligo
agauccucuugccacgccg

SEQ ID NO: 60644 - RNA, 19 nt, Artificial Sequence
  Antisense Oligo
cggcguggcaagaggaucu

SEQ ID NO: 60645 - RNA, 19 nt, Artificial Sequence
  Sense Oligo
gauccucuugccacgccga

SEQ ID NO: 60646 - RNA, 19 nt, Artificial Sequence
  Antisense Oligo
ucggcguggcaagaggauc

SEQ ID NO: 60647 - RNA, 19 nt, Artificial Sequence
  Sense Oligo
auccucuugccacgccgac

SEQ ID NO: 60648 - RNA, 19 nt, Artificial Sequence
  Antisense Oligo
gucggcguggcaagaggau

SEQ ID NO: 60649 - RNA, 19 nt, Artificial Sequence
  Sense Oligo
gccucugugcuaccgcucu

SEQ ID NO: 60650 - RNA, 19 nt, Artificial Sequence
  Antisense Oligo
agagcgguagcacagaggc

SEQ ID NO: 60651 - RNA, 19 nt, Artificial Sequence
  Sense Oligo
ccucugugcuaccgcucuc

SEQ ID NO: 60652 - RNA, 19 nt, Artificial Sequence
  Antisense Oligo
gagagcgguagcacagagg

SEQ ID NO: 60653 - RNA, 19 nt, Artificial Sequence
  Sense Oligo
cucugugcuaccgcucucg

SEQ ID NO: 60654 - RNA, 19 nt, Artificial Sequence
  Antisense Oligo
cgagagcgguagcacagag

SEQ ID NO: 60655 - RNA, 19 nt, Artificial Sequence
  Sense Oligo
ucugugcuaccgcucucgu

SEQ ID NO: 60656 - RNA, 19 nt, Artificial Sequence
  Antisense Oligo
acgagagcgguagcacaga

SEQ ID NO: 60657 - RNA, 19 nt, Artificial Sequence
  Sense Oligo
cugugcuaccgcucucguc

SEQ ID NO: 60658 - RNA, 19 nt, Artificial Sequence
  Antisense Oligo
gacgagagcgguagcacag

SEQ ID NO: 60659 - RNA, 19 nt, Artificial Sequence
  Sense Oligo
ugugcuaccgcucucguca

SEQ ID NO: 60660 - RNA, 19 nt, Artificial Sequence
  Antisense Oligo
ugacgagagcgguagcaca

SEQ ID NO: 60661 - RNA, 19 nt, Artificial Sequence
  Sense Oligo
gugcuaccgcucucgucag

SEQ ID NO: 60662 - RNA, 19 nt, Artificial Sequence
  Antisense Oligo
cugacgagagcgguagcac

SEQ ID NO: 60663 - RNA, 19 nt, Artificial Sequence
  Sense Oligo
ugcuaccgcucucgucagc

SEQ ID NO: 60664 - RNA, 19 nt, Artificial Sequence
  Antisense Oligo
gcugacgagagcgguagca

SEQ ID NO: 60665 - RNA, 19 nt, Artificial Sequence
  Sense Oligo
gcuaccgcucucgucagcu

SEQ ID NO: 60666 - RNA, 19 nt, Artificial Sequence
  Antisense Oligo
agcugacgagagcgguagc

SEQ ID NO: 60667 - RNA, 19 nt, Artificial Sequence
  Sense Oligo
cuaccgcucucgucagcua

SEQ ID NO: 60668 - RNA, 19 nt, Artificial Sequence
  Antisense Oligo
uagcugacgagagcgguag

SEQ ID NO: 60669 - RNA, 19 nt, Artificial Sequence
  Sense Oligo
uaccgcucucgucagcuac

SEQ ID NO: 60670 - RNA, 19 nt, Artificial Sequence
  Antisense Oligo
guagcugacgagagcggua

SEQ ID NO: 60671 - RNA, 19 nt, Artificial Sequence
  Sense Oligo
accgcucucgucagcuacu

SEQ ID NO: 60672 - RNA, 19 nt, Artificial Sequence
  Antisense Oligo
aguagcugacgagagcggu

SEQ ID NO: 60673 - RNA, 19 nt, Artificial Sequence
  Sense Oligo
ccgcucucgucagcuacuu

SEQ ID NO: 60674 - RNA, 19 nt, Artificial Sequence
  Antisense Oligo
aaguagcugacgagagcgg

SEQ ID NO: 60675 - RNA, 19 nt, Artificial Sequence
  Sense Oligo
cgcucucgucagcuacuug

SEQ ID NO: 60676 - RNA, 19 nt, Artificial Sequence
  Antisense Oligo
caaguagcugacgagagcg

SEQ ID NO: 60677 - RNA, 19 nt, Artificial Sequence
  Sense Oligo
gucagcuacuugauucgcc

SEQ ID NO: 60678 - RNA, 19 nt, Artificial Sequence
  Antisense Oligo
ggcgaaucaaguagcugac

SEQ ID NO: 60679 - RNA, 19 nt, Artificial Sequence
  Sense Oligo
ucagcuacuugauucgccu

SEQ ID NO: 60680 - RNA, 19 nt, Artificial Sequence
  Antisense Oligo
aggcgaaucaaguagcuga

SEQ ID NO: 60681 - RNA, 19 nt, Artificial Sequence
  Sense Oligo
cagcuacuugauucgccua

SEQ ID NO: 60682 - RNA, 19 nt, Artificial Sequence
  Antisense Oligo
uaggcgaaucaaguagcug

SEQ ID NO: 60683 - RNA, 19 nt, Artificial Sequence
  Sense Oligo
agcuacuugauucgccuac

SEQ ID NO: 60684 - RNA, 19 nt, Artificial Sequence
  Antisense Oligo
guaggcgaaucaaguagcu

SEQ ID NO: 60685 - RNA, 19 nt, Artificial Sequence
  Sense Oligo
aaauugucuacgccgugga

SEQ ID NO: 60686 - RNA, 19 nt, Artificial Sequence
  Antisense Oligo
uccacggcguagacaauuu

SEQ ID NO: 60687 - RNA, 19 nt, Artificial Sequence
  Sense Oligo
aauugucuacgccguggaa

SEQ ID NO: 60688 - RNA, 19 nt, Artificial Sequence
  Antisense Oligo
uuccacggcguagacaauu

SEQ ID NO: 60689 - RNA, 19 nt, Artificial Sequence
  Sense Oligo
acagguuugugcacgagcc

SEQ ID NO: 60690 - RNA, 19 nt, Artificial Sequence
  Antisense Oligo
ggcucgugcacaaaccugu

SEQ ID NO: 60691 - RNA, 19 nt, Artificial Sequence
  Sense Oligo
cagguuugugcacgagcca

SEQ ID NO: 60692 - RNA, 19 nt, Artificial Sequence
  Antisense Oligo
uggcucgugcacaaaccug

SEQ ID NO: 60693 - RNA, 19 nt, Artificial Sequence
  Sense Oligo
agguuugugcacgagccac

SEQ ID NO: 60694 - RNA, 19 nt, Artificial Sequence
  Antisense Oligo
guggcucgugcacaaaccu

SEQ ID NO: 60695 - RNA, 19 nt, Artificial Sequence
  Sense Oligo
gguuugugcacgagccacc

SEQ ID NO: 60696 - RNA, 19 nt, Artificial Sequence
  Antisense Oligo
gguggcucgugcacaaacc

SEQ ID NO: 60697 - RNA, 19 nt, Artificial Sequence
  Sense Oligo
guuugugcacgagccacca

SEQ ID NO: 60698 - RNA, 19 nt, Artificial Sequence
  Antisense Oligo
ugguggcucgugcacaaac

SEQ ID NO: 60699 - RNA, 19 nt, Artificial Sequence
  Sense Oligo
uuugugcacgagccaccag

SEQ ID NO: 60700 - RNA, 19 nt, Artificial Sequence
  Antisense Oligo
cugguggcucgugcacaaa

SEQ ID NO: 60701 - RNA, 19 nt, Artificial Sequence
  Sense Oligo
uugugcacgagccaccagg

SEQ ID NO: 60702 - RNA, 19 nt, Artificial Sequence
  Antisense Oligo
ccugguggcucgugcacaa

SEQ ID NO: 60703 - RNA, 19 nt, Artificial Sequence
  Sense Oligo
ugugcacgagccaccagga

SEQ ID NO: 60704 - RNA, 19 nt, Artificial Sequence
  Antisense Oligo
uccugguggcucgugcaca

SEQ ID NO: 60705 - RNA, 19 nt, Artificial Sequence
  Sense Oligo
gugcacgagccaccaggaa

SEQ ID NO: 60706 - RNA, 19 nt, Artificial Sequence
  Antisense Oligo
uuccugguggcucgugcac

SEQ ID NO: 60707 - RNA, 19 nt, Artificial Sequence
  Sense Oligo
ugcacgagccaccaggaag

SEQ ID NO: 60708 - RNA, 19 nt, Artificial Sequence
  Antisense Oligo
cuuccugguggcucgugca

SEQ ID NO: 60709 - RNA, 19 nt, Artificial Sequence
  Sense Oligo
gcacgagccaccaggaagu

SEQ ID NO: 60710 - RNA, 19 nt, Artificial Sequence
  Antisense Oligo
acuuccugguggcucgugc

SEQ ID NO: 60711 - RNA, 19 nt, Artificial Sequence
  Sense Oligo
cacgagccaccaggaagug

SEQ ID NO: 60712 - RNA, 19 nt, Artificial Sequence
  Antisense Oligo
cacuuccugguggcucgug

SEQ ID NO: 60713 - RNA, 19 nt, Artificial Sequence
  Sense Oligo
aggaaguggugccugcuca

SEQ ID NO: 60714 - RNA, 19 nt, Artificial Sequence
  Antisense Oligo
ugagcaggcaccacuuccu

SEQ ID NO: 60715 - RNA, 19 nt, Artificial Sequence
  Sense Oligo
ggaaguggugccugcucag

SEQ ID NO: 60716 - RNA, 19 nt, Artificial Sequence
  Antisense Oligo
cugagcaggcaccacuucc

SEQ ID NO: 60717 - RNA, 19 nt, Artificial Sequence
  Sense Oligo
ugcucagcccagagucccu

SEQ ID NO: 60718 - RNA, 19 nt, Artificial Sequence
  Antisense Oligo
agggacucugggcugagca

SEQ ID NO: 60719 - RNA, 19 nt, Artificial Sequence
  Sense Oligo
ccauacuuggguaggguuu

SEQ ID NO: 60720 - RNA, 19 nt, Artificial Sequence
  Antisense Oligo
aaacccuacccaaguaugg

SEQ ID NO: 60721 - RNA, 19 nt, Artificial Sequence
  Sense Oligo
cauacuuggguaggguuuu

SEQ ID NO: 60722 - RNA, 19 nt, Artificial Sequence
  Antisense Oligo
aaaacccuacccaaguaug

SEQ ID NO: 60723 - RNA, 19 nt, Artificial Sequence
  Sense Oligo
auacuuggguaggguuuuc

SEQ ID NO: 60724 - RNA, 19 nt, Artificial Sequence
  Antisense Oligo
gaaaacccuacccaaguau

SEQ ID NO: 60725 - RNA, 19 nt, Artificial Sequence
  Sense Oligo
uacuuggguaggguuuucc

SEQ ID NO: 60726 - RNA, 19 nt, Artificial Sequence
  Antisense Oligo
ggaaaacccuacccaagua

SEQ ID NO: 60727 - RNA, 19 nt, Artificial Sequence
  Sense Oligo
acuuggguaggguuuucca

SEQ ID NO: 60728 - RNA, 19 nt, Artificial Sequence
  Antisense Oligo
uggaaaacccuacccaagu

SEQ ID NO: 60729 - RNA, 19 nt, Artificial Sequence
  Sense Oligo
cuuggguaggguuuuccac

SEQ ID NO: 60730 - RNA, 19 nt, Artificial Sequence
  Antisense Oligo
guggaaaacccuacccaag

SEQ ID NO: 60731 - RNA, 19 nt, Artificial Sequence
  Sense Oligo
uuggguaggguuuuccacu

SEQ ID NO: 60732 - RNA, 19 nt, Artificial Sequence
  Antisense Oligo
aguggaaaacccuacccaa

SEQ ID NO: 60733 - RNA, 19 nt, Artificial Sequence
  Sense Oligo
guaggguuuuccacugcuc

SEQ ID NO: 60734 - RNA, 19 nt, Artificial Sequence
  Antisense Oligo
gagcaguggaaaacccuac

SEQ ID NO: 60735 - RNA, 19 nt, Artificial Sequence
  Sense Oligo
uaggguuuuccacugcucc

SEQ ID NO: 60736 - RNA, 19 nt, Artificial Sequence
  Antisense Oligo
ggagcaguggaaaacccua

SEQ ID NO: 60737 - RNA, 19 nt, Artificial Sequence
  Sense Oligo
gguuuuccacugcuccaac

SEQ ID NO: 60738 - RNA, 19 nt, Artificial Sequence
  Antisense Oligo
guuggagcaguggaaaacc

SEQ ID NO: 60739 - RNA, 19 nt, Artificial Sequence
  Sense Oligo
guuuuccacugcuccaacu

SEQ ID NO: 60740 - RNA, 19 nt, Artificial Sequence
  Antisense Oligo
aguuggagcaguggaaaac

SEQ ID NO: 60741 - RNA, 19 nt, Artificial Sequence
  Sense Oligo
uuuuccacugcuccaacug

SEQ ID NO: 60742 - RNA, 19 nt, Artificial Sequence
  Antisense Oligo
caguuggagcaguggaaaa

SEQ ID NO: 60743 - RNA, 19 nt, Artificial Sequence
  Sense Oligo
uuuccacugcuccaacugu

SEQ ID NO: 60744 - RNA, 19 nt, Artificial Sequence
  Antisense Oligo
acaguuggagcaguggaaa

SEQ ID NO: 60745 - RNA, 19 nt, Artificial Sequence
  Sense Oligo
uggacgcugagcgcugucu

SEQ ID NO: 60746 - RNA, 19 nt, Artificial Sequence
  Antisense Oligo
agacagcgcucagcgucca

SEQ ID NO: 60747 - RNA, 19 nt, Artificial Sequence
  Sense Oligo
ggacgcugagcgcugucuu

SEQ ID NO: 60748 - RNA, 19 nt, Artificial Sequence
  Antisense Oligo
aagacagcgcucagcgucc

SEQ ID NO: 60749 - RNA, 19 nt, Artificial Sequence
  Sense Oligo
gcugagcgcugucuuucug

SEQ ID NO: 60750 - RNA, 19 nt, Artificial Sequence
  Antisense Oligo
cagaaagacagcgcucagc

SEQ ID NO: 60751 - RNA, 19 nt, Artificial Sequence
  Sense Oligo
cugagcgcugucuuucugc

SEQ ID NO: 60752 - RNA, 19 nt, Artificial Sequence
  Antisense Oligo
gcagaaagacagcgcucag

SEQ ID NO: 60753 - RNA, 19 nt, Artificial Sequence
  Sense Oligo
ugagcgcugucuuucugcc

SEQ ID NO: 60754 - RNA, 19 nt, Artificial Sequence
  Antisense Oligo
ggcagaaagacagcgcuca

SEQ ID NO: 60755 - RNA, 19 nt, Artificial Sequence
  Sense Oligo
gagcgcugucuuucugccc

SEQ ID NO: 60756 - RNA, 19 nt, Artificial Sequence
  Antisense Oligo
gggcagaaagacagcgcuc

SEQ ID NO: 60757 - RNA, 19 nt, Artificial Sequence
  Sense Oligo
cccucagcuauuccgugga

SEQ ID NO: 60758 - RNA, 19 nt, Artificial Sequence
  Antisense Oligo
uccacggaauagcugaggg

SEQ ID NO: 60759 - RNA, 19 nt, Artificial Sequence
  Sense Oligo
ccucagcuauuccguggau

SEQ ID NO: 60760 - RNA, 19 nt, Artificial Sequence
  Antisense Oligo
auccacggaauagcugagg

SEQ ID NO: 60761 - RNA, 19 nt, Artificial Sequence
  Sense Oligo
cucagcuauuccguggaug

SEQ ID NO: 60762 - RNA, 19 nt, Artificial Sequence
  Antisense Oligo
cauccacggaauagcugag

SEQ ID NO: 60763 - RNA, 19 nt, Artificial Sequence
  Sense Oligo
gcuauuccguggaugccgc

SEQ ID NO: 60764 - RNA, 19 nt, Artificial Sequence
  Antisense Oligo
gcggcauccacggaauagc

SEQ ID NO: 60765 - RNA, 19 nt, Artificial Sequence
  Sense Oligo
caucaguuaugaaguggag

SEQ ID NO: 60766 - RNA, 19 nt, Artificial Sequence
  Antisense Oligo
cuccacuucauaacugaug

SEQ ID NO: 60767 - RNA, 19 nt, Artificial Sequence
  Sense Oligo
aucaguuaugaaguggagc

SEQ ID NO: 60768 - RNA, 19 nt, Artificial Sequence
  Antisense Oligo
gcuccacuucauaacugau

SEQ ID NO: 60769 - RNA, 19 nt, Artificial Sequence
  Sense Oligo
ucaguuaugaaguggagcg

SEQ ID NO: 60770 - RNA, 19 nt, Artificial Sequence
  Antisense Oligo
cgcuccacuucauaacuga

SEQ ID NO: 60771 - RNA, 19 nt, Artificial Sequence
  Sense Oligo
caguuaugaaguggagcgg

SEQ ID NO: 60772 - RNA, 19 nt, Artificial Sequence
  Antisense Oligo
ccgcuccacuucauaacug

SEQ ID NO: 60773 - RNA, 19 nt, Artificial Sequence
  Sense Oligo
aguuaugaaguggagcggg

SEQ ID NO: 60774 - RNA, 19 nt, Artificial Sequence
  Antisense Oligo
cccgcuccacuucauaacu

SEQ ID NO: 60775 - RNA, 19 nt, Artificial Sequence
  Sense Oligo
guuaugaaguggagcggga

SEQ ID NO: 60776 - RNA, 19 nt, Artificial Sequence
  Antisense Oligo
ucccgcuccacuucauaac

SEQ ID NO: 60777 - RNA, 19 nt, Artificial Sequence
  Sense Oligo
cugacuccacugauucucu

SEQ ID NO: 60778 - RNA, 19 nt, Artificial Sequence
  Antisense Oligo
agagaaucaguggagucag

SEQ ID NO: 60779 - RNA, 19 nt, Artificial Sequence
  Sense Oligo
ugacuccacugauucucuc

SEQ ID NO: 60780 - RNA, 19 nt, Artificial Sequence
  Antisense Oligo
gagagaaucaguggaguca

SEQ ID NO: 60781 - RNA, 19 nt, Artificial Sequence
  Sense Oligo
uccacugauucucuccaac

SEQ ID NO: 60782 - RNA, 19 nt, Artificial Sequence
  Antisense Oligo
guuggagagaaucagugga

SEQ ID NO: 60783 - RNA, 19 nt, Artificial Sequence
  Sense Oligo
ccacugauucucuccaacu

SEQ ID NO: 60784 - RNA, 19 nt, Artificial Sequence
  Antisense Oligo
aguuggagagaaucagugg

SEQ ID NO: 60785 - RNA, 19 nt, Artificial Sequence
  Sense Oligo
cacugauucucuccaacug

SEQ ID NO: 60786 - RNA, 19 nt, Artificial Sequence
  Antisense Oligo
caguuggagagaaucagug

SEQ ID NO: 60787 - RNA, 19 nt, Artificial Sequence
  Sense Oligo
acugauucucuccaacugc

SEQ ID NO: 60788 - RNA, 19 nt, Artificial Sequence
  Antisense Oligo
gcaguuggagagaaucagu

SEQ ID NO: 60789 - RNA, 19 nt, Artificial Sequence
  Sense Oligo
cucuccaacugccaguacc

SEQ ID NO: 60790 - RNA, 19 nt, Artificial Sequence
  Antisense Oligo
gguacuggcaguuggagag

SEQ ID NO: 60791 - RNA, 19 nt, Artificial Sequence
  Sense Oligo
ccaacugccaguaccaggu

SEQ ID NO: 60792 - RNA, 19 nt, Artificial Sequence
  Antisense Oligo
accugguacuggcaguugg

SEQ ID NO: 60793 - RNA, 19 nt, Artificial Sequence
  Sense Oligo
caacugccaguaccaggug

SEQ ID NO: 60794 - RNA, 19 nt, Artificial Sequence
  Antisense Oligo
caccugguacuggcaguug

SEQ ID NO: 60795 - RNA, 19 nt, Artificial Sequence
  Sense Oligo
acugccaguaccaggugga

SEQ ID NO: 60796 - RNA, 19 nt, Artificial Sequence
  Antisense Oligo
uccaccugguacuggcagu

SEQ ID NO: 60797 - RNA, 19 nt, Artificial Sequence
  Sense Oligo
cugccaguaccagguggag

SEQ ID NO: 60798 - RNA, 19 nt, Artificial Sequence
  Antisense Oligo
cuccaccugguacuggcag

SEQ ID NO: 60799 - RNA, 19 nt, Artificial Sequence
  Sense Oligo
ugccaguaccagguggagg

SEQ ID NO: 60800 - RNA, 19 nt, Artificial Sequence
  Antisense Oligo
ccuccaccugguacuggca

SEQ ID NO: 60801 - RNA, 19 nt, Artificial Sequence
  Sense Oligo
gccaguaccagguggagga

SEQ ID NO: 60802 - RNA, 19 nt, Artificial Sequence
  Antisense Oligo
uccuccaccugguacuggc

SEQ ID NO: 60803 - RNA, 19 nt, Artificial Sequence
  Sense Oligo
ccaguaccagguggaggag

SEQ ID NO: 60804 - RNA, 19 nt, Artificial Sequence
  Antisense Oligo
cuccuccaccugguacugg

SEQ ID NO: 60805 - RNA, 19 nt, Artificial Sequence
  Sense Oligo
caguaccagguggaggagg

SEQ ID NO: 60806 - RNA, 19 nt, Artificial Sequence
  Antisense Oligo
ccuccuccaccugguacug

SEQ ID NO: 60807 - RNA, 19 nt, Artificial Sequence
  Sense Oligo
aguaccagguggaggaggg

SEQ ID NO: 60808 - RNA, 19 nt, Artificial Sequence
  Antisense Oligo
cccuccuccaccugguacu

SEQ ID NO: 60809 - RNA, 19 nt, Artificial Sequence
  Sense Oligo
agaccgugcaggaguucga

SEQ ID NO: 60810 - RNA, 19 nt, Artificial Sequence
  Antisense Oligo
ucgaacuccugcacggucu

SEQ ID NO: 60811 - RNA, 19 nt, Artificial Sequence
  Sense Oligo
gaccgugcaggaguucgau

SEQ ID NO: 60812 - RNA, 19 nt, Artificial Sequence
  Antisense Oligo
aucgaacuccugcacgguc

SEQ ID NO: 60813 - RNA, 19 nt, Artificial Sequence
  Sense Oligo
aagauucagcggcagaucg

SEQ ID NO: 60814 - RNA, 19 nt, Artificial Sequence
  Antisense Oligo
cgaucugccgcugaaucuu

SEQ ID NO: 60815 - RNA, 19 nt, Artificial Sequence
  Sense Oligo
agauucagcggcagaucgu

SEQ ID NO: 60816 - RNA, 19 nt, Artificial Sequence
  Antisense Oligo
acgaucugccgcugaaucu

SEQ ID NO: 60817 - RNA, 19 nt, Artificial Sequence
  Sense Oligo
gauucagcggcagaucguc

SEQ ID NO: 60818 - RNA, 19 nt, Artificial Sequence
  Antisense Oligo
gacgaucugccgcugaauc

SEQ ID NO: 60819 - RNA, 19 nt, Artificial Sequence
  Sense Oligo
auucagcggcagaucguca

SEQ ID NO: 60820 - RNA, 19 nt, Artificial Sequence
  Antisense Oligo
ugacgaucugccgcugaau

SEQ ID NO: 60821 - RNA, 19 nt, Artificial Sequence
  Sense Oligo
uucagcggcagaucgucag

SEQ ID NO: 60822 - RNA, 19 nt, Artificial Sequence
  Antisense Oligo
cugacgaucugccgcugaa

SEQ ID NO: 60823 - RNA, 19 nt, Artificial Sequence
  Sense Oligo
ucagcggcagaucgucagc

SEQ ID NO: 60824 - RNA, 19 nt, Artificial Sequence
  Antisense Oligo
gcugacgaucugccgcuga

SEQ ID NO: 60825 - RNA, 19 nt, Artificial Sequence
  Sense Oligo
ggcagaucgucagccgcuu

SEQ ID NO: 60826 - RNA, 19 nt, Artificial Sequence
  Antisense Oligo
aagcggcugacgaucugcc

SEQ ID NO: 60827 - RNA, 19 nt, Artificial Sequence
  Sense Oligo
gcagaucgucagccgcuuc

SEQ ID NO: 60828 - RNA, 19 nt, Artificial Sequence
  Antisense Oligo
gaagcggcugacgaucugc

SEQ ID NO: 60829 - RNA, 19 nt, Artificial Sequence
  Sense Oligo
cagaucgucagccgcuucc

SEQ ID NO: 60830 - RNA, 19 nt, Artificial Sequence
  Antisense Oligo
ggaagcggcugacgaucug

SEQ ID NO: 60831 - RNA, 19 nt, Artificial Sequence
  Sense Oligo
agaucgucagccgcuuccu

SEQ ID NO: 60832 - RNA, 19 nt, Artificial Sequence
  Antisense Oligo
aggaagcggcugacgaucu

SEQ ID NO: 60833 - RNA, 19 nt, Artificial Sequence
  Sense Oligo
gaucgucagccgcuuccuc

SEQ ID NO: 60834 - RNA, 19 nt, Artificial Sequence
  Antisense Oligo
gaggaagcggcugacgauc

SEQ ID NO: 60835 - RNA, 19 nt, Artificial Sequence
  Sense Oligo
ccggcugagccucaaggua

SEQ ID NO: 60836 - RNA, 19 nt, Artificial Sequence
  Antisense Oligo
uaccuugaggcucagccgg

SEQ ID NO: 60837 - RNA, 19 nt, Artificial Sequence
  Sense Oligo
cggcugagccucaagguag

SEQ ID NO: 60838 - RNA, 19 nt, Artificial Sequence
  Antisense Oligo
cuaccuugaggcucagccg

SEQ ID NO: 60839 - RNA, 19 nt, Artificial Sequence
  Sense Oligo
ggcugagccucaagguagg

SEQ ID NO: 60840 - RNA, 19 nt, Artificial Sequence
  Antisense Oligo
ccuaccuugaggcucagcc

SEQ ID NO: 60841 - RNA, 19 nt, Artificial Sequence
  Sense Oligo
gcugagccucaagguaggg

SEQ ID NO: 60842 - RNA, 19 nt, Artificial Sequence
  Antisense Oligo
cccuaccuugaggcucagc

SEQ ID NO: 60843 - RNA, 19 nt, Artificial Sequence
  Sense Oligo
cugagccucaagguagggc

SEQ ID NO: 60844 - RNA, 19 nt, Artificial Sequence
  Antisense Oligo
gcccuaccuugaggcucag

SEQ ID NO: 60845 - RNA, 19 nt, Artificial Sequence
  Sense Oligo
gccucaagguagggcugac

SEQ ID NO: 60846 - RNA, 19 nt, Artificial Sequence
  Antisense Oligo
gucagcccuaccuugaggc

SEQ ID NO: 60847 - RNA, 19 nt, Artificial Sequence
  Sense Oligo
ccucaagguagggcugacu

SEQ ID NO: 60848 - RNA, 19 nt, Artificial Sequence
  Antisense Oligo
agucagcccuaccuugagg

SEQ ID NO: 60849 - RNA, 19 nt, Artificial Sequence
  Sense Oligo
cucaagguagggcugacuc

SEQ ID NO: 60850 - RNA, 19 nt, Artificial Sequence
  Antisense Oligo
gagucagcccuaccuugag

SEQ ID NO: 60851 - RNA, 19 nt, Artificial Sequence
  Sense Oligo
ucaagguagggcugacucc

SEQ ID NO: 60852 - RNA, 19 nt, Artificial Sequence
  Antisense Oligo
ggagucagcccuaccuuga

SEQ ID NO: 60853 - RNA, 19 nt, Artificial Sequence
  Sense Oligo
caagguagggcugacuccu

SEQ ID NO: 60854 - RNA, 19 nt, Artificial Sequence
  Antisense Oligo
aggagucagcccuaccuug

SEQ ID NO: 60855 - RNA, 19 nt, Artificial Sequence
  Sense Oligo
aagguagggcugacuccug

SEQ ID NO: 60856 - RNA, 19 nt, Artificial Sequence
  Antisense Oligo
caggagucagcccuaccuu

SEQ ID NO: 60857 - RNA, 19 nt, Artificial Sequence
  Sense Oligo
agguagggcugacuccugc

SEQ ID NO: 60858 - RNA, 19 nt, Artificial Sequence
  Antisense Oligo
gcaggagucagcccuaccu

SEQ ID NO: 60859 - RNA, 19 nt, Artificial Sequence
  Sense Oligo
guagggcugacuccugcca

SEQ ID NO: 60860 - RNA, 19 nt, Artificial Sequence
  Antisense Oligo
uggcaggagucagcccuac

SEQ ID NO: 60861 - RNA, 19 nt, Artificial Sequence
  Sense Oligo
uagggcugacuccugccac

SEQ ID NO: 60862 - RNA, 19 nt, Artificial Sequence
  Antisense Oligo
guggcaggagucagcccua

SEQ ID NO: 60863 - RNA, 19 nt, Artificial Sequence
  Sense Oligo
agggcugacuccugccacu

SEQ ID NO: 60864 - RNA, 19 nt, Artificial Sequence
  Antisense Oligo
aguggcaggagucagcccu

SEQ ID NO: 60865 - RNA, 19 nt, Artificial Sequence
  Sense Oligo
uccugccacugcugcucau

SEQ ID NO: 60866 - RNA, 19 nt, Artificial Sequence
  Antisense Oligo
augagcagcaguggcagga

SEQ ID NO: 60867 - RNA, 19 nt, Artificial Sequence
  Sense Oligo
ccugccacugcugcucauu

SEQ ID NO: 60868 - RNA, 19 nt, Artificial Sequence
  Antisense Oligo
aaugagcagcaguggcagg

SEQ ID NO: 60869 - RNA, 19 nt, Artificial Sequence
  Sense Oligo
cugccacugcugcucauuu

SEQ ID NO: 60870 - RNA, 19 nt, Artificial Sequence
  Antisense Oligo
aaaugagcagcaguggcag

SEQ ID NO: 60871 - RNA, 19 nt, Artificial Sequence
  Sense Oligo
gccacugcugcucauuugg

SEQ ID NO: 60872 - RNA, 19 nt, Artificial Sequence
  Antisense Oligo
ccaaaugagcagcaguggc

SEQ ID NO: 60873 - RNA, 19 nt, Artificial Sequence
  Sense Oligo
ccacugcugcucauuuggu

SEQ ID NO: 60874 - RNA, 19 nt, Artificial Sequence
  Antisense Oligo
accaaaugagcagcagugg

SEQ ID NO: 60875 - RNA, 19 nt, Artificial Sequence
  Sense Oligo
cacugcugcucauuuggug

SEQ ID NO: 60876 - RNA, 19 nt, Artificial Sequence
  Antisense Oligo
caccaaaugagcagcagug

SEQ ID NO: 60877 - RNA, 19 nt, Artificial Sequence
  Sense Oligo
acugcugcucauuuggugu

SEQ ID NO: 60878 - RNA, 19 nt, Artificial Sequence
  Antisense Oligo
acaccaaaugagcagcagu

SEQ ID NO: 60879 - RNA, 19 nt, Artificial Sequence
  Sense Oligo
cugcugcucauuuggugug

SEQ ID NO: 60880 - RNA, 19 nt, Artificial Sequence
  Antisense Oligo
cacaccaaaugagcagcag

SEQ ID NO: 60881 - RNA, 19 nt, Artificial Sequence
  Sense Oligo
ugcucauuuggugugucug

SEQ ID NO: 60882 - RNA, 19 nt, Artificial Sequence
  Antisense Oligo
cagacacaccaaaugagca

SEQ ID NO: 60883 - RNA, 19 nt, Artificial Sequence
  Sense Oligo
gcucauuuggugugucugu

SEQ ID NO: 60884 - RNA, 19 nt, Artificial Sequence
  Antisense Oligo
acagacacaccaaaugagc

SEQ ID NO: 60885 - RNA, 19 nt, Artificial Sequence
  Sense Oligo
cucauuuggugugucuguu

SEQ ID NO: 60886 - RNA, 19 nt, Artificial Sequence
  Antisense Oligo
aacagacacaccaaaugag

SEQ ID NO: 60887 - RNA, 19 nt, Artificial Sequence
  Sense Oligo
ucauuuggugugucuguug

SEQ ID NO: 60888 - RNA, 19 nt, Artificial Sequence
  Antisense Oligo
caacagacacaccaaauga

SEQ ID NO: 60889 - RNA, 19 nt, Artificial Sequence
  Sense Oligo
ccuugguguguuucucgag

SEQ ID NO: 60890 - RNA, 19 nt, Artificial Sequence
  Antisense Oligo
cucgagaaacacaccaagg

SEQ ID NO: 60891 - RNA, 19 nt, Artificial Sequence
  Sense Oligo
agggaagcagcaccucacc

SEQ ID NO: 60892 - RNA, 19 nt, Artificial Sequence
  Antisense Oligo
ggugaggugcugcuucccu

SEQ ID NO: 60893 - RNA, 19 nt, Artificial Sequence
  Sense Oligo
ggaagcagcaccucacccu

SEQ ID NO: 60894 - RNA, 19 nt, Artificial Sequence
  Antisense Oligo
agggugaggugcugcuucc

SEQ ID NO: 60895 - RNA, 19 nt, Artificial Sequence
  Sense Oligo
gaagcagcaccucacccug

SEQ ID NO: 60896 - RNA, 19 nt, Artificial Sequence
  Antisense Oligo
cagggugaggugcugcuuc

SEQ ID NO: 60897 - RNA, 19 nt, Artificial Sequence
  Sense Oligo
ccucacccugcagucuggu

SEQ ID NO: 60898 - RNA, 19 nt, Artificial Sequence
  Antisense Oligo
accagacugcagggugagg

SEQ ID NO: 60899 - RNA, 19 nt, Artificial Sequence
  Sense Oligo
ucacccugcagucuggucu

SEQ ID NO: 60900 - RNA, 19 nt, Artificial Sequence
  Antisense Oligo
agaccagacugcaggguga

SEQ ID NO: 60901 - RNA, 19 nt, Artificial Sequence
  Sense Oligo
cacccugcagucuggucug

SEQ ID NO: 60902 - RNA, 19 nt, Artificial Sequence
  Antisense Oligo
cagaccagacugcagggug

SEQ ID NO: 60903 - RNA, 19 nt, Artificial Sequence
  Sense Oligo
acccugcagucuggucugu

SEQ ID NO: 60904 - RNA, 19 nt, Artificial Sequence
  Antisense Oligo
acagaccagacugcagggu

SEQ ID NO: 60905 - RNA, 19 nt, Artificial Sequence
  Sense Oligo
cccugcagucuggucugua

SEQ ID NO: 60906 - RNA, 19 nt, Artificial Sequence
  Antisense Oligo
uacagaccagacugcaggg

SEQ ID NO: 60907 - RNA, 19 nt, Artificial Sequence
  Sense Oligo
ccugcagucuggucuguau

SEQ ID NO: 60908 - RNA, 19 nt, Artificial Sequence
  Antisense Oligo
auacagaccagacugcagg

SEQ ID NO: 60909 - RNA, 19 nt, Artificial Sequence
  Sense Oligo
cugcagucuggucuguauc

SEQ ID NO: 60910 - RNA, 19 nt, Artificial Sequence
  Antisense Oligo
gauacagaccagacugcag

SEQ ID NO: 60911 - RNA, 19 nt, Artificial Sequence
  Sense Oligo
ugcagucuggucuguaucu

SEQ ID NO: 60912 - RNA, 19 nt, Artificial Sequence
  Antisense Oligo
agauacagaccagacugca

SEQ ID NO: 60913 - RNA, 19 nt, Artificial Sequence
  Sense Oligo
gcagucuggucuguaucuc

SEQ ID NO: 60914 - RNA, 19 nt, Artificial Sequence
  Antisense Oligo
gagauacagaccagacugc

SEQ ID NO: 60915 - RNA, 19 nt, Artificial Sequence
  Sense Oligo
cagucuggucuguaucucc

SEQ ID NO: 60916 - RNA, 19 nt, Artificial Sequence
  Antisense Oligo
ggagauacagaccagacug

SEQ ID NO: 60917 - RNA, 19 nt, Artificial Sequence
  Sense Oligo
gucuggucuguaucuccuc

SEQ ID NO: 60918 - RNA, 19 nt, Artificial Sequence
  Antisense Oligo
gaggagauacagaccagac

SEQ ID NO: 60919 - RNA, 19 nt, Artificial Sequence
  Sense Oligo
gucuguaucuccucccuca

SEQ ID NO: 60920 - RNA, 19 nt, Artificial Sequence
  Antisense Oligo
ugagggaggagauacagac

SEQ ID NO: 60921 - RNA, 19 nt, Artificial Sequence
  Sense Oligo
cuguaucuccucccucaca

SEQ ID NO: 60922 - RNA, 19 nt, Artificial Sequence
  Antisense Oligo
ugugagggaggagauacag

SEQ ID NO: 60923 - RNA, 19 nt, Artificial Sequence
  Sense Oligo
uguaucuccucccucacac

SEQ ID NO: 60924 - RNA, 19 nt, Artificial Sequence
  Antisense Oligo
gugugagggaggagauaca

SEQ ID NO: 60925 - RNA, 19 nt, Artificial Sequence
  Sense Oligo
uccugagcccucuccugca

SEQ ID NO: 60926 - RNA, 19 nt, Artificial Sequence
  Antisense Oligo
ugcaggagagggcucagga

SEQ ID NO: 60927 - RNA, 19 nt, Artificial Sequence
  Sense Oligo
ucuccugcagggccaucug

SEQ ID NO: 60928 - RNA, 19 nt, Artificial Sequence
  Antisense Oligo
cagauggcccugcaggaga

SEQ ID NO: 60929 - RNA, 19 nt, Artificial Sequence
  Sense Oligo
cagggccaucugcaccuca

SEQ ID NO: 60930 - RNA, 19 nt, Artificial Sequence
  Antisense Oligo
ugaggugcagauggcccug

SEQ ID NO: 60931 - RNA, 19 nt, Artificial Sequence
  Sense Oligo
agggccaucugcaccucag

SEQ ID NO: 60932 - RNA, 19 nt, Artificial Sequence
  Antisense Oligo
cugaggugcagauggcccu

SEQ ID NO: 60933 - RNA, 19 nt, Artificial Sequence
  Sense Oligo
gggccaucugcaccucagu

SEQ ID NO: 60934 - RNA, 19 nt, Artificial Sequence
  Antisense Oligo
acugaggugcagauggccc

SEQ ID NO: 60935 - RNA, 19 nt, Artificial Sequence
  Sense Oligo
ggccaucugcaccucaguc

SEQ ID NO: 60936 - RNA, 19 nt, Artificial Sequence
  Antisense Oligo
gacugaggugcagauggcc

SEQ ID NO: 60937 - RNA, 19 nt, Artificial Sequence
  Sense Oligo
gccaucugcaccucagucc

SEQ ID NO: 60938 - RNA, 19 nt, Artificial Sequence
  Antisense Oligo
ggacugaggugcagauggc

SEQ ID NO: 60939 - RNA, 19 nt, Artificial Sequence
  Sense Oligo
ccaucugcaccucaguccc

SEQ ID NO: 60940 - RNA, 19 nt, Artificial Sequence
  Antisense Oligo
gggacugaggugcagaugg

SEQ ID NO: 60941 - RNA, 19 nt, Artificial Sequence
  Sense Oligo
ucucacucugucaccgagg

SEQ ID NO: 60942 - RNA, 19 nt, Artificial Sequence
  Antisense Oligo
ccucggugacagagugaga

SEQ ID NO: 60943 - RNA, 19 nt, Artificial Sequence
  Sense Oligo
cucacucugucaccgaggc

SEQ ID NO: 60944 - RNA, 19 nt, Artificial Sequence
  Antisense Oligo
gccucggugacagagugag

SEQ ID NO: 60945 - RNA, 19 nt, Artificial Sequence
  Sense Oligo
cucugggcucaagcgaucc

SEQ ID NO: 60946 - RNA, 19 nt, Artificial Sequence
  Antisense Oligo
ggaucgcuugagcccagag

SEQ ID NO: 60947 - RNA, 19 nt, Artificial Sequence
  Sense Oligo
ucugggcucaagcgauccu

SEQ ID NO: 60948 - RNA, 19 nt, Artificial Sequence
  Antisense Oligo
aggaucgcuugagcccaga

SEQ ID NO: 60949 - RNA, 19 nt, Artificial Sequence
  Sense Oligo
cugggcucaagcgauccuc

SEQ ID NO: 60950 - RNA, 19 nt, Artificial Sequence
  Antisense Oligo
gaggaucgcuugagcccag

SEQ ID NO: 60951 - RNA, 19 nt, Artificial Sequence
  Sense Oligo
ugggcucaagcgauccucu

SEQ ID NO: 60952 - RNA, 19 nt, Artificial Sequence
  Antisense Oligo
agaggaucgcuugagccca

SEQ ID NO: 60953 - RNA, 19 nt, Artificial Sequence
  Sense Oligo
gggcucaagcgauccucuc

SEQ ID NO: 60954 - RNA, 19 nt, Artificial Sequence
  Antisense Oligo
gagaggaucgcuugagccc

SEQ ID NO: 60955 - RNA, 19 nt, Artificial Sequence
  Sense Oligo
ggcucaagcgauccucuca

SEQ ID NO: 60956 - RNA, 19 nt, Artificial Sequence
  Antisense Oligo
ugagaggaucgcuugagcc

SEQ ID NO: 60957 - RNA, 19 nt, Artificial Sequence
  Sense Oligo
gcucaagcgauccucucac

SEQ ID NO: 60958 - RNA, 19 nt, Artificial Sequence
  Antisense Oligo
gugagaggaucgcuugagc

SEQ ID NO: 60959 - RNA, 19 nt, Artificial Sequence
  Sense Oligo
cucaagcgauccucucaca

SEQ ID NO: 60960 - RNA, 19 nt, Artificial Sequence
  Antisense Oligo
ugugagaggaucgcuugag

SEQ ID NO: 60961 - RNA, 19 nt, Artificial Sequence
  Sense Oligo
ucucacaucagcuucccaa

SEQ ID NO: 60962 - RNA, 19 nt, Artificial Sequence
  Antisense Oligo
uugggaagcugaugugaga

SEQ ID NO: 60963 - RNA, 19 nt, Artificial Sequence
  Sense Oligo
ucacaucagcuucccaaau

SEQ ID NO: 60964 - RNA, 19 nt, Artificial Sequence
  Antisense Oligo
auuugggaagcugauguga

SEQ ID NO: 60965 - RNA, 19 nt, Artificial Sequence
  Sense Oligo
cacaucagcuucccaaaua

SEQ ID NO: 60966 - RNA, 19 nt, Artificial Sequence
  Antisense Oligo
uauuugggaagcugaugug

SEQ ID NO: 60967 - RNA, 19 nt, Artificial Sequence
  Sense Oligo
caagugugcaccaccaugc

SEQ ID NO: 60968 - RNA, 19 nt, Artificial Sequence
  Antisense Oligo
gcaugguggugcacacuug

SEQ ID NO: 60969 - RNA, 19 nt, Artificial Sequence
  Sense Oligo
aagugugcaccaccaugcc

SEQ ID NO: 60970 - RNA, 19 nt, Artificial Sequence
  Antisense Oligo
ggcaugguggugcacacuu

SEQ ID NO: 60971 - RNA, 19 nt, Artificial Sequence
  Sense Oligo
agugugcaccaccaugccc

SEQ ID NO: 60972 - RNA, 19 nt, Artificial Sequence
  Antisense Oligo
gggcaugguggugcacacu

SEQ ID NO: 60973 - RNA, 19 nt, Artificial Sequence
  Sense Oligo
gugugcaccaccaugccca

SEQ ID NO: 60974 - RNA, 19 nt, Artificial Sequence
  Antisense Oligo
ugggcaugguggugcacac

SEQ ID NO: 60975 - RNA, 19 nt, Artificial Sequence
  Sense Oligo
ugugcaccaccaugcccag

SEQ ID NO: 60976 - RNA, 19 nt, Artificial Sequence
  Antisense Oligo
cugggcaugguggugcaca

SEQ ID NO: 60977 - RNA, 19 nt, Artificial Sequence
  Sense Oligo
ugcaccaccaugcccagcu

SEQ ID NO: 60978 - RNA, 19 nt, Artificial Sequence
  Antisense Oligo
agcugggcaugguggugca

SEQ ID NO: 60979 - RNA, 19 nt, Artificial Sequence
  Sense Oligo
gcaccaccaugcccagcua

SEQ ID NO: 60980 - RNA, 19 nt, Artificial Sequence
  Antisense Oligo
uagcugggcaugguggugc

SEQ ID NO: 60981 - RNA, 19 nt, Artificial Sequence
  Sense Oligo
caccaccaugcccagcuaa

SEQ ID NO: 60982 - RNA, 19 nt, Artificial Sequence
  Antisense Oligo
uuagcugggcaugguggug

SEQ ID NO: 60983 - RNA, 19 nt, Artificial Sequence
  Sense Oligo
accaccaugcccagcuaau

SEQ ID NO: 60984 - RNA, 19 nt, Artificial Sequence
  Antisense Oligo
auuagcugggcaugguggu

SEQ ID NO: 60985 - RNA, 19 nt, Artificial Sequence
  Sense Oligo
ccaccaugcccagcuaauu

SEQ ID NO: 60986 - RNA, 19 nt, Artificial Sequence
  Antisense Oligo
aauuagcugggcauggugg

SEQ ID NO: 60987 - RNA, 19 nt, Artificial Sequence
  Sense Oligo
caccaugcccagcuaauuu

SEQ ID NO: 60988 - RNA, 19 nt, Artificial Sequence
  Antisense Oligo
aaauuagcugggcauggug

SEQ ID NO: 60989 - RNA, 19 nt, Artificial Sequence
  Sense Oligo
accaugcccagcuaauuug

SEQ ID NO: 60990 - RNA, 19 nt, Artificial Sequence
  Antisense Oligo
caaauuagcugggcauggu

SEQ ID NO: 60991 - RNA, 19 nt, Artificial Sequence
  Sense Oligo
ccaugcccagcuaauuugu

SEQ ID NO: 60992 - RNA, 19 nt, Artificial Sequence
  Antisense Oligo
acaaauuagcugggcaugg

SEQ ID NO: 60993 - RNA, 19 nt, Artificial Sequence
  Sense Oligo
caugcccagcuaauuugug

SEQ ID NO: 60994 - RNA, 19 nt, Artificial Sequence
  Antisense Oligo
cacaaauuagcugggcaug

SEQ ID NO: 60995 - RNA, 19 nt, Artificial Sequence
  Sense Oligo
augcccagcuaauuugugu

SEQ ID NO: 60996 - RNA, 19 nt, Artificial Sequence
  Antisense Oligo
acacaaauuagcugggcau

SEQ ID NO: 60997 - RNA, 19 nt, Artificial Sequence
  Sense Oligo
ugcccagcuaauuugugua

SEQ ID NO: 60998 - RNA, 19 nt, Artificial Sequence
  Antisense Oligo
uacacaaauuagcugggca

SEQ ID NO: 60999 - RNA, 19 nt, Artificial Sequence
  Sense Oligo
ccuaggccucccaaagugc

SEQ ID NO: 61000 - RNA, 19 nt, Artificial Sequence
  Antisense Oligo
gcacuuugggaggccuagg

SEQ ID NO: 61001 - RNA, 19 nt, Artificial Sequence
  Sense Oligo
cuaggccucccaaagugcu

SEQ ID NO: 61002 - RNA, 19 nt, Artificial Sequence
  Antisense Oligo
agcacuuugggaggccuag

SEQ ID NO: 61003 - RNA, 19 nt, Artificial Sequence
  Sense Oligo
aagugcugggauuauaggc

SEQ ID NO: 61004 - RNA, 19 nt, Artificial Sequence
  Antisense Oligo
gccuauaaucccagcacuu

SEQ ID NO: 61005 - RNA, 19 nt, Artificial Sequence
  Sense Oligo
agugcugggauuauaggcg

SEQ ID NO: 61006 - RNA, 19 nt, Artificial Sequence
  Antisense Oligo
cgccuauaaucccagcacu

SEQ ID NO: 61007 - RNA, 19 nt, Artificial Sequence
  Sense Oligo
gugcugggauuauaggcgu

SEQ ID NO: 61008 - RNA, 19 nt, Artificial Sequence
  Antisense Oligo
acgccuauaaucccagcac

SEQ ID NO: 61009 - RNA, 19 nt, Artificial Sequence
  Sense Oligo
ugcugggauuauaggcgug

SEQ ID NO: 61010 - RNA, 19 nt, Artificial Sequence
  Antisense Oligo
cacgccuauaaucccagca

SEQ ID NO: 61011 - RNA, 19 nt, Artificial Sequence
  Sense Oligo
gcugggauuauaggcguga

SEQ ID NO: 61012 - RNA, 19 nt, Artificial Sequence
  Antisense Oligo
ucacgccuauaaucccagc

SEQ ID NO: 61013 - RNA, 19 nt, Artificial Sequence
  Sense Oligo
cugggauuauaggcgugag

SEQ ID NO: 61014 - RNA, 19 nt, Artificial Sequence
  Antisense Oligo
cucacgccuauaaucccag

SEQ ID NO: 61015 - RNA, 19 nt, Artificial Sequence
  Sense Oligo
ugggauuauaggcgugagc

SEQ ID NO: 61016 - RNA, 19 nt, Artificial Sequence
  Antisense Oligo
gcucacgccuauaauccca

SEQ ID NO: 61017 - RNA, 19 nt, Artificial Sequence
  Sense Oligo
auuauaggcgugagccacu

SEQ ID NO: 61018 - RNA, 19 nt, Artificial Sequence
  Antisense Oligo
aguggcucacgccuauaau

SEQ ID NO: 61019 - RNA, 19 nt, Artificial Sequence
  Sense Oligo
ugagccacugcacccagcu

SEQ ID NO: 61020 - RNA, 19 nt, Artificial Sequence
  Antisense Oligo
agcugggugcaguggcuca

SEQ ID NO: 61021 - RNA, 19 nt, Artificial Sequence
  Sense Oligo
agccacugcacccagcuga

SEQ ID NO: 61022 - RNA, 19 nt, Artificial Sequence
  Antisense Oligo
ucagcugggugcaguggcu

SEQ ID NO: 61023 - RNA, 19 nt, Artificial Sequence
  Sense Oligo
guugaggucuugauucuac

SEQ ID NO: 61024 - RNA, 19 nt, Artificial Sequence
  Antisense Oligo
guagaaucaagaccucaac

SEQ ID NO: 61025 - RNA, 19 nt, Artificial Sequence
  Sense Oligo
aggucuugauucuaccagu

SEQ ID NO: 61026 - RNA, 19 nt, Artificial Sequence
  Antisense Oligo
acugguagaaucaagaccu

SEQ ID NO: 61027 - RNA, 19 nt, Artificial Sequence
  Sense Oligo
ggucuugauucuaccaguu

SEQ ID NO: 61028 - RNA, 19 nt, Artificial Sequence
  Antisense Oligo
aacugguagaaucaagacc

SEQ ID NO: 61029 - RNA, 19 nt, Artificial Sequence
  Sense Oligo
gucuugauucuaccaguua

SEQ ID NO: 61030 - RNA, 19 nt, Artificial Sequence
  Antisense Oligo
uaacugguagaaucaagac

SEQ ID NO: 61031 - RNA, 19 nt, Artificial Sequence
  Sense Oligo
ucuugauucuaccaguuaa

SEQ ID NO: 61032 - RNA, 19 nt, Artificial Sequence
  Antisense Oligo
uuaacugguagaaucaaga

SEQ ID NO: 61033 - RNA, 19 nt, Artificial Sequence
  Sense Oligo
cuugauucuaccaguuaau

SEQ ID NO: 61034 - RNA, 19 nt, Artificial Sequence
  Antisense Oligo
auuaacugguagaaucaag

SEQ ID NO: 61035 - RNA, 19 nt, Artificial Sequence
  Sense Oligo
uugauucuaccaguuaaug

SEQ ID NO: 61036 - RNA, 19 nt, Artificial Sequence
  Antisense Oligo
cauuaacugguagaaucaa

SEQ ID NO: 61037 - RNA, 19 nt, Artificial Sequence
  Sense Oligo
ugauucuaccaguuaaugg

SEQ ID NO: 61038 - RNA, 19 nt, Artificial Sequence
  Antisense Oligo
ccauuaacugguagaauca

SEQ ID NO: 61039 - RNA, 19 nt, Artificial Sequence
  Sense Oligo
auucuaccaguuaauggca

SEQ ID NO: 61040 - RNA, 19 nt, Artificial Sequence
  Antisense Oligo
ugccauuaacugguagaau

SEQ ID NO: 61041 - RNA, 19 nt, Artificial Sequence
  Sense Oligo
uucuaccaguuaauggcac

SEQ ID NO: 61042 - RNA, 19 nt, Artificial Sequence
  Antisense Oligo
gugccauuaacugguagaa

SEQ ID NO: 61043 - RNA, 19 nt, Artificial Sequence
  Sense Oligo
ucuaccaguuaauggcacc

SEQ ID NO: 61044 - RNA, 19 nt, Artificial Sequence
  Antisense Oligo
ggugccauuaacugguaga

SEQ ID NO: 61045 - RNA, 19 nt, Artificial Sequence
  Sense Oligo
cuaccaguuaauggcacca

SEQ ID NO: 61046 - RNA, 19 nt, Artificial Sequence
  Antisense Oligo
uggugccauuaacugguag

SEQ ID NO: 61047 - RNA, 19 nt, Artificial Sequence
  Sense Oligo
uaccaguuaauggcaccac

SEQ ID NO: 61048 - RNA, 19 nt, Artificial Sequence
  Antisense Oligo
guggugccauuaacuggua

SEQ ID NO: 61049 - RNA, 19 nt, Artificial Sequence
  Sense Oligo
uucagccuccauggguaac

SEQ ID NO: 61050 - RNA, 19 nt, Artificial Sequence
  Antisense Oligo
guuacccauggaggcugaa

SEQ ID NO: 61051 - RNA, 19 nt, Artificial Sequence
  Sense Oligo
ccuccauggguaaccugcc

SEQ ID NO: 61052 - RNA, 19 nt, Artificial Sequence
  Antisense Oligo
ggcagguuacccauggagg

SEQ ID NO: 61053 - RNA, 19 nt, Artificial Sequence
  Sense Oligo
cuccauggguaaccugcca

SEQ ID NO: 61054 - RNA, 19 nt, Artificial Sequence
  Antisense Oligo
uggcagguuacccauggag

SEQ ID NO: 61055 - RNA, 19 nt, Artificial Sequence
  Sense Oligo
uccauggguaaccugccag

SEQ ID NO: 61056 - RNA, 19 nt, Artificial Sequence
  Antisense Oligo
cuggcagguuacccaugga

SEQ ID NO: 61057 - RNA, 19 nt, Artificial Sequence
  Sense Oligo
ccauggguaaccugccagc

SEQ ID NO: 61058 - RNA, 19 nt, Artificial Sequence
  Antisense Oligo
gcuggcagguuacccaugg

SEQ ID NO: 61059 - RNA, 19 nt, Artificial Sequence
  Sense Oligo
cauggguaaccugccagca

SEQ ID NO: 61060 - RNA, 19 nt, Artificial Sequence
  Antisense Oligo
ugcuggcagguuacccaug

SEQ ID NO: 61061 - RNA, 19 nt, Artificial Sequence
  Sense Oligo
gguaaccugccagcagaug

SEQ ID NO: 61062 - RNA, 19 nt, Artificial Sequence
  Antisense Oligo
caucugcuggcagguuacc

SEQ ID NO: 61063 - RNA, 19 nt, Artificial Sequence
  Sense Oligo
aaccugccagcagaugcca

SEQ ID NO: 61064 - RNA, 19 nt, Artificial Sequence
  Antisense Oligo
uggcaucugcuggcagguu

SEQ ID NO: 61065 - RNA, 19 nt, Artificial Sequence
  Sense Oligo
ugccagcagaugccauuag

SEQ ID NO: 61066 - RNA, 19 nt, Artificial Sequence
  Antisense Oligo
cuaauggcaucugcuggca

SEQ ID NO: 61067 - RNA, 19 nt, Artificial Sequence
  Sense Oligo
gccagcagaugccauuagc

SEQ ID NO: 61068 - RNA, 19 nt, Artificial Sequence
  Antisense Oligo
gcuaauggcaucugcuggc

SEQ ID NO: 61069 - RNA, 19 nt, Artificial Sequence
  Sense Oligo
ccagcagaugccauuagcu

SEQ ID NO: 61070 - RNA, 19 nt, Artificial Sequence
  Antisense Oligo
agcuaauggcaucugcugg

SEQ ID NO: 61071 - RNA, 19 nt, Artificial Sequence
  Sense Oligo
agcagaugccauuagcugu

SEQ ID NO: 61072 - RNA, 19 nt, Artificial Sequence
  Antisense Oligo
acagcuaauggcaucugcu

SEQ ID NO: 61073 - RNA, 19 nt, Artificial Sequence
  Sense Oligo
gcagaugccauuagcugug

SEQ ID NO: 61074 - RNA, 19 nt, Artificial Sequence
  Antisense Oligo
cacagcuaauggcaucugc

SEQ ID NO: 61075 - RNA, 19 nt, Artificial Sequence
  Sense Oligo
cagaugccauuagcugugc

SEQ ID NO: 61076 - RNA, 19 nt, Artificial Sequence
  Antisense Oligo
gcacagcuaauggcaucug

SEQ ID NO: 61077 - RNA, 19 nt, Artificial Sequence
  Sense Oligo
agaugccauuagcugugcc

SEQ ID NO: 61078 - RNA, 19 nt, Artificial Sequence
  Antisense Oligo
ggcacagcuaauggcaucu

SEQ ID NO: 61079 - RNA, 19 nt, Artificial Sequence
  Sense Oligo
uguguguccucaccugacu

SEQ ID NO: 61080 - RNA, 19 nt, Artificial Sequence
  Antisense Oligo
agucaggugaggacacaca

SEQ ID NO: 61081 - RNA, 19 nt, Artificial Sequence
  Sense Oligo
guguguccucaccugacug

SEQ ID NO: 61082 - RNA, 19 nt, Artificial Sequence
  Antisense Oligo
cagucaggugaggacacac

SEQ ID NO: 61083 - RNA, 19 nt, Artificial Sequence
  Sense Oligo
uguguccucaccugacugc

SEQ ID NO: 61084 - RNA, 19 nt, Artificial Sequence
  Antisense Oligo
gcagucaggugaggacaca

SEQ ID NO: 61085 - RNA, 19 nt, Artificial Sequence
  Sense Oligo
aguuaaaagcauccuguac

SEQ ID NO: 61086 - RNA, 19 nt, Artificial Sequence
  Antisense Oligo
guacaggaugcuuuuaacu

SEQ ID NO: 61087 - RNA, 19 nt, Artificial Sequence
  Sense Oligo
guuaaaagcauccuguacg

SEQ ID NO: 61088 - RNA, 19 nt, Artificial Sequence
  Antisense Oligo
cguacaggaugcuuuuaac

SEQ ID NO: 61089 - RNA, 19 nt, Artificial Sequence
  Sense Oligo
uuaaaagcauccuguacgu

SEQ ID NO: 61090 - RNA, 19 nt, Artificial Sequence
  Antisense Oligo
acguacaggaugcuuuuaa

SEQ ID NO: 61091 - RNA, 19 nt, Artificial Sequence
  Sense Oligo
uaaaagcauccuguacguu

SEQ ID NO: 61092 - RNA, 19 nt, Artificial Sequence
  Antisense Oligo
aacguacaggaugcuuuua

SEQ ID NO: 61093 - RNA, 19 nt, Artificial Sequence
  Sense Oligo
aaaagcauccuguacguug

SEQ ID NO: 61094 - RNA, 19 nt, Artificial Sequence
  Antisense Oligo
caacguacaggaugcuuuu

SEQ ID NO: 61095 - RNA, 19 nt, Artificial Sequence
  Sense Oligo
aaagcauccuguacguugg

SEQ ID NO: 61096 - RNA, 19 nt, Artificial Sequence
  Antisense Oligo
ccaacguacaggaugcuuu

SEQ ID NO: 61097 - RNA, 19 nt, Artificial Sequence
  Sense Oligo
aagcauccuguacguugga

SEQ ID NO: 61098 - RNA, 19 nt, Artificial Sequence
  Antisense Oligo
uccaacguacaggaugcuu

SEQ ID NO: 61099 - RNA, 19 nt, Artificial Sequence
  Sense Oligo
agcauccuguacguuggac

SEQ ID NO: 61100 - RNA, 19 nt, Artificial Sequence
  Antisense Oligo
guccaacguacaggaugcu

SEQ ID NO: 61101 - RNA, 19 nt, Artificial Sequence
  Sense Oligo
gcauccuguacguuggacu

SEQ ID NO: 61102 - RNA, 19 nt, Artificial Sequence
  Antisense Oligo
aguccaacguacaggaugc

SEQ ID NO: 61103 - RNA, 19 nt, Artificial Sequence
  Sense Oligo
ccuguacguuggacugcua

SEQ ID NO: 61104 - RNA, 19 nt, Artificial Sequence
  Antisense Oligo
uagcaguccaacguacagg

SEQ ID NO: 61105 - RNA, 19 nt, Artificial Sequence
  Sense Oligo
cuguacguuggacugcuag

SEQ ID NO: 61106 - RNA, 19 nt, Artificial Sequence
  Antisense Oligo
cuagcaguccaacguacag

SEQ ID NO: 61107 - RNA, 19 nt, Artificial Sequence
  Sense Oligo
uguacguuggacugcuagc

SEQ ID NO: 61108 - RNA, 19 nt, Artificial Sequence
  Antisense Oligo
gcuagcaguccaacguaca

SEQ ID NO: 61109 - RNA, 19 nt, Artificial Sequence
  Sense Oligo
guacguuggacugcuagcc

SEQ ID NO: 61110 - RNA, 19 nt, Artificial Sequence
  Antisense Oligo
ggcuagcaguccaacguac

SEQ ID NO: 61111 - RNA, 19 nt, Artificial Sequence
  Sense Oligo
uacguuggacugcuagcca

SEQ ID NO: 61112 - RNA, 19 nt, Artificial Sequence
  Antisense Oligo
uggcuagcaguccaacgua

SEQ ID NO: 61113 - RNA, 19 nt, Artificial Sequence
  Sense Oligo
acguuggacugcuagccac

SEQ ID NO: 61114 - RNA, 19 nt, Artificial Sequence
  Antisense Oligo
guggcuagcaguccaacgu

SEQ ID NO: 61115 - RNA, 19 nt, Artificial Sequence
  Sense Oligo
cguuggacugcuagccacu

SEQ ID NO: 61116 - RNA, 19 nt, Artificial Sequence
  Antisense Oligo
aguggcuagcaguccaacg

SEQ ID NO: 61117 - RNA, 19 nt, Artificial Sequence
  Sense Oligo
guuggacugcuagccacuc

SEQ ID NO: 61118 - RNA, 19 nt, Artificial Sequence
  Antisense Oligo
gaguggcuagcaguccaac

SEQ ID NO: 61119 - RNA, 19 nt, Artificial Sequence
  Sense Oligo
gacugcuagccacuccuaa

SEQ ID NO: 61120 - RNA, 19 nt, Artificial Sequence
  Antisense Oligo
uuaggaguggcuagcaguc

SEQ ID NO: 61121 - RNA, 19 nt, Artificial Sequence
  Sense Oligo
acugcuagccacuccuaac

SEQ ID NO: 61122 - RNA, 19 nt, Artificial Sequence
  Antisense Oligo
guuaggaguggcuagcagu

SEQ ID NO: 61123 - RNA, 19 nt, Artificial Sequence
  Sense Oligo
cugcuagccacuccuaacu

SEQ ID NO: 61124 - RNA, 19 nt, Artificial Sequence
  Antisense Oligo
aguuaggaguggcuagcag

SEQ ID NO: 61125 - RNA, 19 nt, Artificial Sequence
  Sense Oligo
uagccacuccuaacuggug

SEQ ID NO: 61126 - RNA, 19 nt, Artificial Sequence
  Antisense Oligo
caccaguuaggaguggcua

SEQ ID NO: 61127 - RNA, 19 nt, Artificial Sequence
  Sense Oligo
cacuccuaacuggugccca

SEQ ID NO: 61128 - RNA, 19 nt, Artificial Sequence
  Antisense Oligo
ugggcaccaguuaggagug

SEQ ID NO: 61129 - RNA, 19 nt, Artificial Sequence
  Sense Oligo
acuccuaacuggugcccac

SEQ ID NO: 61130 - RNA, 19 nt, Artificial Sequence
  Antisense Oligo
gugggcaccaguuaggagu

SEQ ID NO: 61131 - RNA, 19 nt, Artificial Sequence
  Sense Oligo
cuaacuggugcccaccucc

SEQ ID NO: 61132 - RNA, 19 nt, Artificial Sequence
  Antisense Oligo
ggaggugggcaccaguuag

SEQ ID NO: 61133 - RNA, 19 nt, Artificial Sequence
  Sense Oligo
ugcccaccuccagguucuu

SEQ ID NO: 61134 - RNA, 19 nt, Artificial Sequence
  Antisense Oligo
aagaaccuggaggugggca

SEQ ID NO: 61135 - RNA, 19 nt, Artificial Sequence
  Sense Oligo
gcccaccuccagguucuuc

SEQ ID NO: 61136 - RNA, 19 nt, Artificial Sequence
  Antisense Oligo
gaagaaccuggaggugggc

SEQ ID NO: 61137 - RNA, 19 nt, Artificial Sequence
  Sense Oligo
accuccagguucuucaguc

SEQ ID NO: 61138 - RNA, 19 nt, Artificial Sequence
  Antisense Oligo
gacugaagaaccuggaggu

SEQ ID NO: 61139 - RNA, 19 nt, Artificial Sequence
  Sense Oligo
ccuccagguucuucagucc

SEQ ID NO: 61140 - RNA, 19 nt, Artificial Sequence
  Antisense Oligo
ggacugaagaaccuggagg

SEQ ID NO: 61141 - RNA, 19 nt, Artificial Sequence
  Sense Oligo
cuccagguucuucagucca

SEQ ID NO: 61142 - RNA, 19 nt, Artificial Sequence
  Antisense Oligo
uggacugaagaaccuggag

SEQ ID NO: 61143 - RNA, 19 nt, Artificial Sequence
  Sense Oligo
aacccacaucuggcucucu

SEQ ID NO: 61144 - RNA, 19 nt, Artificial Sequence
  Antisense Oligo
agagagccagauguggguu

SEQ ID NO: 61145 - RNA, 19 nt, Artificial Sequence
  Sense Oligo
acccacaucuggcucucuu

SEQ ID NO: 61146 - RNA, 19 nt, Artificial Sequence
  Antisense Oligo
aagagagccagaugugggu

SEQ ID NO: 61147 - RNA, 19 nt, Artificial Sequence
  Sense Oligo
caucuggcucucuucaucc

SEQ ID NO: 61148 - RNA, 19 nt, Artificial Sequence
  Antisense Oligo
ggaugaagagagccagaug

SEQ ID NO: 61149 - RNA, 19 nt, Artificial Sequence
  Sense Oligo
ucuggcucucuucauccug

SEQ ID NO: 61150 - RNA, 19 nt, Artificial Sequence
  Antisense Oligo
caggaugaagagagccaga

SEQ ID NO: 61151 - RNA, 19 nt, Artificial Sequence
  Sense Oligo
cuggcucucuucauccugu

SEQ ID NO: 61152 - RNA, 19 nt, Artificial Sequence
  Antisense Oligo
acaggaugaagagagccag

SEQ ID NO: 61153 - RNA, 19 nt, Artificial Sequence
  Sense Oligo
uggcucucuucauccugug

SEQ ID NO: 61154 - RNA, 19 nt, Artificial Sequence
  Antisense Oligo
cacaggaugaagagagcca

SEQ ID NO: 61155 - RNA, 19 nt, Artificial Sequence
  Sense Oligo
ggcucucuucauccugugc

SEQ ID NO: 61156 - RNA, 19 nt, Artificial Sequence
  Antisense Oligo
gcacaggaugaagagagcc

SEQ ID NO: 61157 - RNA, 19 nt, Artificial Sequence
  Sense Oligo
gcucucuucauccugugcc

SEQ ID NO: 61158 - RNA, 19 nt, Artificial Sequence
  Antisense Oligo
ggcacaggaugaagagagc

SEQ ID NO: 61159 - RNA, 19 nt, Artificial Sequence
  Sense Oligo
cucucuucauccugugccg

SEQ ID NO: 61160 - RNA, 19 nt, Artificial Sequence
  Antisense Oligo
cggcacaggaugaagagag

SEQ ID NO: 61161 - RNA, 19 nt, Artificial Sequence
  Sense Oligo
ucucuucauccugugccgg

SEQ ID NO: 61162 - RNA, 19 nt, Artificial Sequence
  Antisense Oligo
ccggcacaggaugaagaga

SEQ ID NO: 61163 - RNA, 19 nt, Artificial Sequence
  Sense Oligo
cucuucauccugugccgga

SEQ ID NO: 61164 - RNA, 19 nt, Artificial Sequence
  Antisense Oligo
uccggcacaggaugaagag

SEQ ID NO: 61165 - RNA, 19 nt, Artificial Sequence
  Sense Oligo
uccugugccggauggaccu

SEQ ID NO: 61166 - RNA, 19 nt, Artificial Sequence
  Antisense Oligo
agguccauccggcacagga

SEQ ID NO: 61167 - RNA, 19 nt, Artificial Sequence
  Sense Oligo
auggaccugccuggccucu

SEQ ID NO: 61168 - RNA, 19 nt, Artificial Sequence
  Antisense Oligo
agaggccaggcagguccau

SEQ ID NO: 61169 - RNA, 19 nt, Artificial Sequence
  Sense Oligo
gaccugccuggccucucau

SEQ ID NO: 61170 - RNA, 19 nt, Artificial Sequence
  Antisense Oligo
augagaggccaggcagguc

SEQ ID NO: 61171 - RNA, 19 nt, Artificial Sequence
  Sense Oligo
gccuggccucucauggcau

SEQ ID NO: 61172 - RNA, 19 nt, Artificial Sequence
  Antisense Oligo
augccaugagaggccaggc

SEQ ID NO: 61173 - RNA, 19 nt, Artificial Sequence
  Sense Oligo
ccuggccucucauggcaua

SEQ ID NO: 61174 - RNA, 19 nt, Artificial Sequence
  Antisense Oligo
uaugccaugagaggccagg

SEQ ID NO: 61175 - RNA, 19 nt, Artificial Sequence
  Sense Oligo
cuggccucucauggcauau

SEQ ID NO: 61176 - RNA, 19 nt, Artificial Sequence
  Antisense Oligo
auaugccaugagaggccag

SEQ ID NO: 61177 - RNA, 19 nt, Artificial Sequence
  Sense Oligo
uaaagccgacacucuguug

SEQ ID NO: 61178 - RNA, 19 nt, Artificial Sequence
  Antisense Oligo
caacagagugucggcuuua

SEQ ID NO: 61179 - RNA, 19 nt, Artificial Sequence
  Sense Oligo
aaagccgacacucuguugu

SEQ ID NO: 61180 - RNA, 19 nt, Artificial Sequence
  Antisense Oligo
acaacagagugucggcuuu

SEQ ID NO: 61181 - RNA, 19 nt, Artificial Sequence
  Sense Oligo
cacucuguugucugguaug

SEQ ID NO: 61182 - RNA, 19 nt, Artificial Sequence
  Antisense Oligo
cauaccagacaacagagug

SEQ ID NO: 61183 - RNA, 19 nt, Artificial Sequence
  Sense Oligo
acucuguugucugguaugg

SEQ ID NO: 61184 - RNA, 19 nt, Artificial Sequence
  Antisense Oligo
ccauaccagacaacagagu

SEQ ID NO: 61185 - RNA, 19 nt, Artificial Sequence
  Sense Oligo
uugucugguaugggaggcc

SEQ ID NO: 61186 - RNA, 19 nt, Artificial Sequence
  Antisense Oligo
ggccucccauaccagacaa

SEQ ID NO: 61187 - RNA, 19 nt, Artificial Sequence
  Sense Oligo
ugucugguaugggaggccc

SEQ ID NO: 61188 - RNA, 19 nt, Artificial Sequence
  Antisense Oligo
gggccucccauaccagaca

SEQ ID NO: 61189 - RNA, 19 nt, Artificial Sequence
  Sense Oligo
gucugguaugggaggcccu

SEQ ID NO: 61190 - RNA, 19 nt, Artificial Sequence
  Antisense Oligo
agggccucccauaccagac

SEQ ID NO: 61191 - RNA, 19 nt, Artificial Sequence
  Sense Oligo
ucugguaugggaggcccug

SEQ ID NO: 61192 - RNA, 19 nt, Artificial Sequence
  Antisense Oligo
cagggccucccauaccaga

SEQ ID NO: 61193 - RNA, 19 nt, Artificial Sequence
  Sense Oligo
cugguaugggaggcccugu

SEQ ID NO: 61194 - RNA, 19 nt, Artificial Sequence
  Antisense Oligo
acagggccucccauaccag

SEQ ID NO: 61195 - RNA, 19 nt, Artificial Sequence
  Sense Oligo
ugguaugggaggcccugua

SEQ ID NO: 61196 - RNA, 19 nt, Artificial Sequence
  Antisense Oligo
uacagggccucccauacca

SEQ ID NO: 61197 - RNA, 19 nt, Artificial Sequence
  Sense Oligo
cccugccuccagccacuua

SEQ ID NO: 61198 - RNA, 19 nt, Artificial Sequence
  Antisense Oligo
uaaguggcuggaggcaggg

SEQ ID NO: 61199 - RNA, 19 nt, Artificial Sequence
  Sense Oligo
ccugccuccagccacuuag

SEQ ID NO: 61200 - RNA, 19 nt, Artificial Sequence
  Antisense Oligo
cuaaguggcuggaggcagg

SEQ ID NO: 61201 - RNA, 19 nt, Artificial Sequence
  Sense Oligo
ccuccagccacuuagccca

SEQ ID NO: 61202 - RNA, 19 nt, Artificial Sequence
  Antisense Oligo
ugggcuaaguggcuggagg

SEQ ID NO: 61203 - RNA, 19 nt, Artificial Sequence
  Sense Oligo
cuccagccacuuagcccau

SEQ ID NO: 61204 - RNA, 19 nt, Artificial Sequence
  Antisense Oligo
augggcuaaguggcuggag

SEQ ID NO: 61205 - RNA, 19 nt, Artificial Sequence
  Sense Oligo
uccagccacuuagcccauu

SEQ ID NO: 61206 - RNA, 19 nt, Artificial Sequence
  Antisense Oligo
aaugggcuaaguggcugga

SEQ ID NO: 61207 - RNA, 19 nt, Artificial Sequence
  Sense Oligo
ccagccacuuagcccauuu

SEQ ID NO: 61208 - RNA, 19 nt, Artificial Sequence
  Antisense Oligo
aaaugggcuaaguggcugg

SEQ ID NO: 61209 - RNA, 19 nt, Artificial Sequence
  Sense Oligo
cagccacuuagcccauuuc

SEQ ID NO: 61210 - RNA, 19 nt, Artificial Sequence
  Antisense Oligo
gaaaugggcuaaguggcug

SEQ ID NO: 61211 - RNA, 19 nt, Artificial Sequence
  Sense Oligo
agccacuuagcccauuucc

SEQ ID NO: 61212 - RNA, 19 nt, Artificial Sequence
  Antisense Oligo
ggaaaugggcuaaguggcu

SEQ ID NO: 61213 - RNA, 19 nt, Artificial Sequence
  Sense Oligo
acuuagcccauuucccuga

SEQ ID NO: 61214 - RNA, 19 nt, Artificial Sequence
  Antisense Oligo
ucagggaaaugggcuaagu

SEQ ID NO: 61215 - RNA, 19 nt, Artificial Sequence
  Sense Oligo
cuuagcccauuucccugaa

SEQ ID NO: 61216 - RNA, 19 nt, Artificial Sequence
  Antisense Oligo
uucagggaaaugggcuaag

SEQ ID NO: 61217 - RNA, 19 nt, Artificial Sequence
  Sense Oligo
cugcaucccgugaccucau

SEQ ID NO: 61218 - RNA, 19 nt, Artificial Sequence
  Antisense Oligo
augaggucacgggaugcag

SEQ ID NO: 61219 - RNA, 19 nt, Artificial Sequence
  Sense Oligo
ugcaucccgugaccucaug

SEQ ID NO: 61220 - RNA, 19 nt, Artificial Sequence
  Antisense Oligo
caugaggucacgggaugca

SEQ ID NO: 61221 - RNA, 19 nt, Artificial Sequence
  Sense Oligo
caucccgugaccucaugca

SEQ ID NO: 61222 - RNA, 19 nt, Artificial Sequence
  Antisense Oligo
ugcaugaggucacgggaug

SEQ ID NO: 61223 - RNA, 19 nt, Artificial Sequence
  Sense Oligo
aucccgugaccucaugcac

SEQ ID NO: 61224 - RNA, 19 nt, Artificial Sequence
  Antisense Oligo
gugcaugaggucacgggau

SEQ ID NO: 61225 - RNA, 19 nt, Artificial Sequence
  Sense Oligo
cagcaggcacuuucccauc

SEQ ID NO: 61226 - RNA, 19 nt, Artificial Sequence
  Antisense Oligo
gaugggaaagugccugcug

SEQ ID NO: 61227 - RNA, 19 nt, Artificial Sequence
  Sense Oligo
agcaggcacuuucccaucu

SEQ ID NO: 61228 - RNA, 19 nt, Artificial Sequence
  Antisense Oligo
agaugggaaagugccugcu

SEQ ID NO: 61229 - RNA, 19 nt, Artificial Sequence
  Sense Oligo
gcacuuucccaucucuguu

SEQ ID NO: 61230 - RNA, 19 nt, Artificial Sequence
  Antisense Oligo
aacagagaugggaaagugc

SEQ ID NO: 61231 - RNA, 19 nt, Artificial Sequence
  Sense Oligo
cacuuucccaucucuguuc

SEQ ID NO: 61232 - RNA, 19 nt, Artificial Sequence
  Antisense Oligo
gaacagagaugggaaagug

SEQ ID NO: 61233 - RNA, 19 nt, Artificial Sequence
  Sense Oligo
cccaucucuguucuuugac

SEQ ID NO: 61234 - RNA, 19 nt, Artificial Sequence
  Antisense Oligo
gucaaagaacagagauggg

SEQ ID NO: 61235 - RNA, 19 nt, Artificial Sequence
  Sense Oligo
ccaucucuguucuuugacu

SEQ ID NO: 61236 - RNA, 19 nt, Artificial Sequence
  Antisense Oligo
agucaaagaacagagaugg

SEQ ID NO: 61237 - RNA, 19 nt, Artificial Sequence
  Sense Oligo
aucucuguucuuugacugg

SEQ ID NO: 61238 - RNA, 19 nt, Artificial Sequence
  Antisense Oligo
ccagucaaagaacagagau

SEQ ID NO: 61239 - RNA, 19 nt, Artificial Sequence
  Sense Oligo
uguucuuugacuggacgca

SEQ ID NO: 61240 - RNA, 19 nt, Artificial Sequence
  Antisense Oligo
ugcguccagucaaagaaca

SEQ ID NO: 61241 - RNA, 19 nt, Artificial Sequence
  Sense Oligo
guucuuugacuggacgcac

SEQ ID NO: 61242 - RNA, 19 nt, Artificial Sequence
  Antisense Oligo
gugcguccagucaaagaac

SEQ ID NO: 61243 - RNA, 19 nt, Artificial Sequence
  Sense Oligo
uucuuugacuggacgcacu

SEQ ID NO: 61244 - RNA, 19 nt, Artificial Sequence
  Antisense Oligo
agugcguccagucaaagaa

SEQ ID NO: 61245 - RNA, 19 nt, Artificial Sequence
  Sense Oligo
uugacuggacgcacuuguu

SEQ ID NO: 61246 - RNA, 19 nt, Artificial Sequence
  Antisense Oligo
aacaagugcguccagucaa

SEQ ID NO: 61247 - RNA, 19 nt, Artificial Sequence
  Sense Oligo
ugacuggacgcacuuguuc

SEQ ID NO: 61248 - RNA, 19 nt, Artificial Sequence
  Antisense Oligo
gaacaagugcguccaguca

SEQ ID NO: 61249 - RNA, 19 nt, Artificial Sequence
  Sense Oligo
gacuggacgcacuuguucc

SEQ ID NO: 61250 - RNA, 19 nt, Artificial Sequence
  Antisense Oligo
ggaacaagugcguccaguc

SEQ ID NO: 61251 - RNA, 19 nt, Artificial Sequence
  Sense Oligo
acuggacgcacuuguuccu

SEQ ID NO: 61252 - RNA, 19 nt, Artificial Sequence
  Antisense Oligo
aggaacaagugcguccagu

SEQ ID NO: 61253 - RNA, 19 nt, Artificial Sequence
  Sense Oligo
cuggacgcacuuguuccuu

SEQ ID NO: 61254 - RNA, 19 nt, Artificial Sequence
  Antisense Oligo
aaggaacaagugcguccag

SEQ ID NO: 61255 - RNA, 19 nt, Artificial Sequence
  Sense Oligo
uggacgcacuuguuccuuc

SEQ ID NO: 61256 - RNA, 19 nt, Artificial Sequence
  Antisense Oligo
gaaggaacaagugcgucca

SEQ ID NO: 61257 - RNA, 19 nt, Artificial Sequence
  Sense Oligo
ggacgcacuuguuccuucc

SEQ ID NO: 61258 - RNA, 19 nt, Artificial Sequence
  Antisense Oligo
ggaaggaacaagugcgucc

SEQ ID NO: 61259 - RNA, 19 nt, Artificial Sequence
  Sense Oligo
gacgcacuuguuccuucca

SEQ ID NO: 61260 - RNA, 19 nt, Artificial Sequence
  Antisense Oligo
uggaaggaacaagugcguc

SEQ ID NO: 61261 - RNA, 19 nt, Artificial Sequence
  Sense Oligo
acgcacuuguuccuuccag

SEQ ID NO: 61262 - RNA, 19 nt, Artificial Sequence
  Antisense Oligo
cuggaaggaacaagugcgu

SEQ ID NO: 61263 - RNA, 19 nt, Artificial Sequence
  Sense Oligo
cgcacuuguuccuuccagc

SEQ ID NO: 61264 - RNA, 19 nt, Artificial Sequence
  Antisense Oligo
gcuggaaggaacaagugcg

SEQ ID NO: 61265 - RNA, 19 nt, Artificial Sequence
  Sense Oligo
gcacuuguuccuuccagcu

SEQ ID NO: 61266 - RNA, 19 nt, Artificial Sequence
  Antisense Oligo
agcuggaaggaacaagugc

SEQ ID NO: 61267 - RNA, 19 nt, Artificial Sequence
  Sense Oligo
cacuuguuccuuccagcug

SEQ ID NO: 61268 - RNA, 19 nt, Artificial Sequence
  Antisense Oligo
cagcuggaaggaacaagug

SEQ ID NO: 61269 - RNA, 19 nt, Artificial Sequence
  Sense Oligo
acuuguuccuuccagcugc

SEQ ID NO: 61270 - RNA, 19 nt, Artificial Sequence
  Antisense Oligo
gcagcuggaaggaacaagu

SEQ ID NO: 61271 - RNA, 19 nt, Artificial Sequence
  Sense Oligo
cuuguuccuuccagcugca

SEQ ID NO: 61272 - RNA, 19 nt, Artificial Sequence
  Antisense Oligo
ugcagcuggaaggaacaag

SEQ ID NO: 61273 - RNA, 19 nt, Artificial Sequence
  Sense Oligo
uccuuccagcugcagucau

SEQ ID NO: 61274 - RNA, 19 nt, Artificial Sequence
  Antisense Oligo
augacugcagcuggaagga

SEQ ID NO: 61275 - RNA, 19 nt, Artificial Sequence
  Sense Oligo
ccuuccagcugcagucaua

SEQ ID NO: 61276 - RNA, 19 nt, Artificial Sequence
  Antisense Oligo
uaugacugcagcuggaagg

SEQ ID NO: 61277 - RNA, 19 nt, Artificial Sequence
  Sense Oligo
cuuccagcugcagucauau

SEQ ID NO: 61278 - RNA, 19 nt, Artificial Sequence
  Antisense Oligo
auaugacugcagcuggaag

SEQ ID NO: 61279 - RNA, 19 nt, Artificial Sequence
  Sense Oligo
auguacgguaccacccgca

SEQ ID NO: 61280 - RNA, 19 nt, Artificial Sequence
  Antisense Oligo
ugcgggugguaccguacau

SEQ ID NO: 61281 - RNA, 19 nt, Artificial Sequence
  Sense Oligo
gacggagucucgcucuguc

SEQ ID NO: 61282 - RNA, 19 nt, Artificial Sequence
  Antisense Oligo
gacagagcgagacuccguc

SEQ ID NO: 61283 - RNA, 19 nt, Artificial Sequence
  Sense Oligo
acggagucucgcucuguca

SEQ ID NO: 61284 - RNA, 19 nt, Artificial Sequence
  Antisense Oligo
ugacagagcgagacuccgu

SEQ ID NO: 61285 - RNA, 19 nt, Artificial Sequence
  Sense Oligo
agucucgcucugucaccca

SEQ ID NO: 61286 - RNA, 19 nt, Artificial Sequence
  Antisense Oligo
ugggugacagagcgagacu

SEQ ID NO: 61287 - RNA, 19 nt, Artificial Sequence
  Sense Oligo
gucucgcucugucacccag

SEQ ID NO: 61288 - RNA, 19 nt, Artificial Sequence
  Antisense Oligo
cugggugacagagcgagac

SEQ ID NO: 61289 - RNA, 19 nt, Artificial Sequence
  Sense Oligo
ucucgcucugucacccagg

SEQ ID NO: 61290 - RNA, 19 nt, Artificial Sequence
  Antisense Oligo
ccugggugacagagcgaga

SEQ ID NO: 61291 - RNA, 19 nt, Artificial Sequence
  Sense Oligo
ucgcucugucacccaggcu

SEQ ID NO: 61292 - RNA, 19 nt, Artificial Sequence
  Antisense Oligo
agccugggugacagagcga

SEQ ID NO: 61293 - RNA, 19 nt, Artificial Sequence
  Sense Oligo
cucugucacccaggcugga

SEQ ID NO: 61294 - RNA, 19 nt, Artificial Sequence
  Antisense Oligo
uccagccugggugacagag

SEQ ID NO: 61295 - RNA, 19 nt, Artificial Sequence
  Sense Oligo
gucacccaggcuggauugc

SEQ ID NO: 61296 - RNA, 19 nt, Artificial Sequence
  Antisense Oligo
gcaauccagccugggugac

SEQ ID NO: 61297 - RNA, 19 nt, Artificial Sequence
  Sense Oligo
ucacccaggcuggauugca

SEQ ID NO: 61298 - RNA, 19 nt, Artificial Sequence
  Antisense Oligo
ugcaauccagccuggguga

SEQ ID NO: 61299 - RNA, 19 nt, Artificial Sequence
  Sense Oligo
ugcaguggcgcaaucucag

SEQ ID NO: 61300 - RNA, 19 nt, Artificial Sequence
  Antisense Oligo
cugagauugcgccacugca

SEQ ID NO: 61301 - RNA, 19 nt, Artificial Sequence
  Sense Oligo
guucacucaugccauucuc

SEQ ID NO: 61302 - RNA, 19 nt, Artificial Sequence
  Antisense Oligo
gagaauggcaugagugaac

SEQ ID NO: 61303 - RNA, 19 nt, Artificial Sequence
  Sense Oligo
uucacucaugccauucucc

SEQ ID NO: 61304 - RNA, 19 nt, Artificial Sequence
  Antisense Oligo
ggagaauggcaugagugaa

SEQ ID NO: 61305 - RNA, 19 nt, Artificial Sequence
  Sense Oligo
ucacucaugccauucuccu

SEQ ID NO: 61306 - RNA, 19 nt, Artificial Sequence
  Antisense Oligo
aggagaauggcaugaguga

SEQ ID NO: 61307 - RNA, 19 nt, Artificial Sequence
  Sense Oligo
cacucaugccauucuccug

SEQ ID NO: 61308 - RNA, 19 nt, Artificial Sequence
  Antisense Oligo
caggagaauggcaugagug

SEQ ID NO: 61309 - RNA, 19 nt, Artificial Sequence
  Sense Oligo
acucaugccauucuccugc

SEQ ID NO: 61310 - RNA, 19 nt, Artificial Sequence
  Antisense Oligo
gcaggagaauggcaugagu

SEQ ID NO: 61311 - RNA, 19 nt, Artificial Sequence
  Sense Oligo
cucaugccauucuccugcc

SEQ ID NO: 61312 - RNA, 19 nt, Artificial Sequence
  Antisense Oligo
ggcaggagaauggcaugag

SEQ ID NO: 61313 - RNA, 19 nt, Artificial Sequence
  Sense Oligo
ucaugccauucuccugccg

SEQ ID NO: 61314 - RNA, 19 nt, Artificial Sequence
  Antisense Oligo
cggcaggagaauggcauga

SEQ ID NO: 61315 - RNA, 19 nt, Artificial Sequence
  Sense Oligo
caugccauucuccugccgc

SEQ ID NO: 61316 - RNA, 19 nt, Artificial Sequence
  Antisense Oligo
gcggcaggagaauggcaug

SEQ ID NO: 61317 - RNA, 19 nt, Artificial Sequence
  Sense Oligo
augccauucuccugccgca

SEQ ID NO: 61318 - RNA, 19 nt, Artificial Sequence
  Antisense Oligo
ugcggcaggagaauggcau

SEQ ID NO: 61319 - RNA, 19 nt, Artificial Sequence
  Sense Oligo
ugccauucuccugccgcag

SEQ ID NO: 61320 - RNA, 19 nt, Artificial Sequence
  Antisense Oligo
cugcggcaggagaauggca

SEQ ID NO: 61321 - RNA, 19 nt, Artificial Sequence
  Sense Oligo
uagcugggacuacaggcgc

SEQ ID NO: 61322 - RNA, 19 nt, Artificial Sequence
  Antisense Oligo
gcgccuguagucccagcua

SEQ ID NO: 61323 - RNA, 19 nt, Artificial Sequence
  Sense Oligo
ggguuucaccauguuagcc

SEQ ID NO: 61324 - RNA, 19 nt, Artificial Sequence
  Antisense Oligo
ggcuaacauggugaaaccc

SEQ ID NO: 61325 - RNA, 19 nt, Artificial Sequence
  Sense Oligo
gguuucaccauguuagcca

SEQ ID NO: 61326 - RNA, 19 nt, Artificial Sequence
  Antisense Oligo
uggcuaacauggugaaacc

SEQ ID NO: 61327 - RNA, 19 nt, Artificial Sequence
  Sense Oligo
caccauguuagccaggaug

SEQ ID NO: 61328 - RNA, 19 nt, Artificial Sequence
  Antisense Oligo
cauccuggcuaacauggug

SEQ ID NO: 61329 - RNA, 19 nt, Artificial Sequence
  Sense Oligo
cauguuagccaggaugguc

SEQ ID NO: 61330 - RNA, 19 nt, Artificial Sequence
  Antisense Oligo
gaccauccuggcuaacaug

SEQ ID NO: 61331 - RNA, 19 nt, Artificial Sequence
  Sense Oligo
auguuagccaggauggucu

SEQ ID NO: 61332 - RNA, 19 nt, Artificial Sequence
  Antisense Oligo
agaccauccuggcuaacau

SEQ ID NO: 61333 - RNA, 19 nt, Artificial Sequence
  Sense Oligo
uguuagccaggauggucuc

SEQ ID NO: 61334 - RNA, 19 nt, Artificial Sequence
  Antisense Oligo
gagaccauccuggcuaaca

SEQ ID NO: 61335 - RNA, 19 nt, Artificial Sequence
  Sense Oligo
guuagccaggauggucucg

SEQ ID NO: 61336 - RNA, 19 nt, Artificial Sequence
  Antisense Oligo
cgagaccauccuggcuaac

SEQ ID NO: 61337 - RNA, 19 nt, Artificial Sequence
  Sense Oligo
uuagccaggauggucucga

SEQ ID NO: 61338 - RNA, 19 nt, Artificial Sequence
  Antisense Oligo
ucgagaccauccuggcuaa

SEQ ID NO: 61339 - RNA, 19 nt, Artificial Sequence
  Sense Oligo
uagccaggauggucucgau

SEQ ID NO: 61340 - RNA, 19 nt, Artificial Sequence
  Antisense Oligo
aucgagaccauccuggcua

SEQ ID NO: 61341 - RNA, 19 nt, Artificial Sequence
  Sense Oligo
caggauggucucgaucucu

SEQ ID NO: 61342 - RNA, 19 nt, Artificial Sequence
  Antisense Oligo
agagaucgagaccauccug

SEQ ID NO: 61343 - RNA, 19 nt, Artificial Sequence
  Sense Oligo
aggauggucucgaucucuu

SEQ ID NO: 61344 - RNA, 19 nt, Artificial Sequence
  Antisense Oligo
aagagaucgagaccauccu

SEQ ID NO: 61345 - RNA, 19 nt, Artificial Sequence
  Sense Oligo
ugacuucgugaucugcccg

SEQ ID NO: 61346 - RNA, 19 nt, Artificial Sequence
  Antisense Oligo
cgggcagaucacgaaguca

SEQ ID NO: 61347 - RNA, 19 nt, Artificial Sequence
  Sense Oligo
gacuucgugaucugcccgu

SEQ ID NO: 61348 - RNA, 19 nt, Artificial Sequence
  Antisense Oligo
acgggcagaucacgaaguc

SEQ ID NO: 61349 - RNA, 19 nt, Artificial Sequence
  Sense Oligo
acuucgugaucugcccguc

SEQ ID NO: 61350 - RNA, 19 nt, Artificial Sequence
  Antisense Oligo
gacgggcagaucacgaagu

SEQ ID NO: 61351 - RNA, 19 nt, Artificial Sequence
  Sense Oligo
uuuaauucauucucacagc

SEQ ID NO: 61352 - RNA, 19 nt, Artificial Sequence
  Antisense Oligo
gcugugagaaugaauuaaa

SEQ ID NO: 61353 - RNA, 19 nt, Artificial Sequence
  Sense Oligo
ucauucucacagccauuuc

SEQ ID NO: 61354 - RNA, 19 nt, Artificial Sequence
  Antisense Oligo
gaaauggcugugagaauga

SEQ ID NO: 61355 - RNA, 19 nt, Artificial Sequence
  Sense Oligo
cauucucacagccauuucc

SEQ ID NO: 61356 - RNA, 19 nt, Artificial Sequence
  Antisense Oligo
ggaaauggcugugagaaug

SEQ ID NO: 61357 - RNA, 19 nt, Artificial Sequence
  Sense Oligo
cagagugacugccugugca

SEQ ID NO: 61358 - RNA, 19 nt, Artificial Sequence
  Antisense Oligo
ugcacaggcagucacucug

SEQ ID NO: 61359 - RNA, 19 nt, Artificial Sequence
  Sense Oligo
gugacugccugugcauggu

SEQ ID NO: 61360 - RNA, 19 nt, Artificial Sequence
  Antisense Oligo
accaugcacaggcagucac

SEQ ID NO: 61361 - RNA, 19 nt, Artificial Sequence
  Sense Oligo
ugacugccugugcaugguc

SEQ ID NO: 61362 - RNA, 19 nt, Artificial Sequence
  Antisense Oligo
gaccaugcacaggcaguca

SEQ ID NO: 61363 - RNA, 19 nt, Artificial Sequence
  Sense Oligo
gacugccugugcauggucu

SEQ ID NO: 61364 - RNA, 19 nt, Artificial Sequence
  Antisense Oligo
agaccaugcacaggcaguc

SEQ ID NO: 61365 - RNA, 19 nt, Artificial Sequence
  Sense Oligo
acugccugugcauggucug

SEQ ID NO: 61366 - RNA, 19 nt, Artificial Sequence
  Antisense Oligo
cagaccaugcacaggcagu

SEQ ID NO: 61367 - RNA, 19 nt, Artificial Sequence
  Sense Oligo
cugccugugcauggucugu

SEQ ID NO: 61368 - RNA, 19 nt, Artificial Sequence
  Antisense Oligo
acagaccaugcacaggcag

SEQ ID NO: 61369 - RNA, 19 nt, Artificial Sequence
  Sense Oligo
ugccugugcauggucugug

SEQ ID NO: 61370 - RNA, 19 nt, Artificial Sequence
  Antisense Oligo
cacagaccaugcacaggca

SEQ ID NO: 61371 - RNA, 19 nt, Artificial Sequence
  Sense Oligo
gccugugcauggucugugc

SEQ ID NO: 61372 - RNA, 19 nt, Artificial Sequence
  Antisense Oligo
gcacagaccaugcacaggc

SEQ ID NO: 61373 - RNA, 19 nt, Artificial Sequence
  Sense Oligo
ccugugcauggucugugcc

SEQ ID NO: 61374 - RNA, 19 nt, Artificial Sequence
  Antisense Oligo
ggcacagaccaugcacagg

SEQ ID NO: 61375 - RNA, 19 nt, Artificial Sequence
  Sense Oligo
cugugcauggucugugccu

SEQ ID NO: 61376 - RNA, 19 nt, Artificial Sequence
  Antisense Oligo
aggcacagaccaugcacag

SEQ ID NO: 61377 - RNA, 19 nt, Artificial Sequence
  Sense Oligo
gcauggucugugccuuuag

SEQ ID NO: 61378 - RNA, 19 nt, Artificial Sequence
  Antisense Oligo
cuaaaggcacagaccaugc

SEQ ID NO: 61379 - RNA, 19 nt, Artificial Sequence
  Sense Oligo
cauggucugugccuuuagu

SEQ ID NO: 61380 - RNA, 19 nt, Artificial Sequence
  Antisense Oligo
acuaaaggcacagaccaug

SEQ ID NO: 61381 - RNA, 19 nt, Artificial Sequence
  Sense Oligo
auggucugugccuuuagug

SEQ ID NO: 61382 - RNA, 19 nt, Artificial Sequence
  Antisense Oligo
cacuaaaggcacagaccau

SEQ ID NO: 61383 - RNA, 19 nt, Artificial Sequence
  Sense Oligo
uggucugugccuuuagugg

SEQ ID NO: 61384 - RNA, 19 nt, Artificial Sequence
  Antisense Oligo
ccacuaaaggcacagacca

SEQ ID NO: 61385 - RNA, 19 nt, Artificial Sequence
  Sense Oligo
cugugccuuuaguggcuga

SEQ ID NO: 61386 - RNA, 19 nt, Artificial Sequence
  Antisense Oligo
ucagccacuaaaggcacag

SEQ ID NO: 61387 - RNA, 19 nt, Artificial Sequence
  Sense Oligo
ugugccuuuaguggcugaa

SEQ ID NO: 61388 - RNA, 19 nt, Artificial Sequence
  Antisense Oligo
uucagccacuaaaggcaca

SEQ ID NO: 61389 - RNA, 19 nt, Artificial Sequence
  Sense Oligo
auaaaugaaugggauaugc

SEQ ID NO: 61390 - RNA, 19 nt, Artificial Sequence
  Antisense Oligo
gcauaucccauucauuuau

SEQ ID NO: 61391 - RNA, 19 nt, Artificial Sequence
  Sense Oligo
caaauaccuguugcccuag

SEQ ID NO: 61392 - RNA, 19 nt, Artificial Sequence
  Antisense Oligo
cuagggcaacagguauuug

SEQ ID NO: 61393 - RNA, 19 nt, Artificial Sequence
  Sense Oligo
aaauaccuguugcccuagc

SEQ ID NO: 61394 - RNA, 19 nt, Artificial Sequence
  Antisense Oligo
gcuagggcaacagguauuu

SEQ ID NO: 61395 - RNA, 19 nt, Artificial Sequence
  Sense Oligo
aauaccuguugcccuagcg

SEQ ID NO: 61396 - RNA, 19 nt, Artificial Sequence
  Antisense Oligo
cgcuagggcaacagguauu

SEQ ID NO: 61397 - RNA, 19 nt, Artificial Sequence
  Sense Oligo
auaccuguugcccuagcgc

SEQ ID NO: 61398 - RNA, 19 nt, Artificial Sequence
  Antisense Oligo
gcgcuagggcaacagguau

SEQ ID NO: 61399 - RNA, 19 nt, Artificial Sequence
  Sense Oligo
uaccuguugcccuagcgcc

SEQ ID NO: 61400 - RNA, 19 nt, Artificial Sequence
  Antisense Oligo
ggcgcuagggcaacaggua

SEQ ID NO: 61401 - RNA, 19 nt, Artificial Sequence
  Sense Oligo
accuguugcccuagcgccu

SEQ ID NO: 61402 - RNA, 19 nt, Artificial Sequence
  Antisense Oligo
aggcgcuagggcaacaggu

SEQ ID NO: 61403 - RNA, 19 nt, Artificial Sequence
  Sense Oligo
gcgaagcaggccacgauga

SEQ ID NO: 61404 - RNA, 19 nt, Artificial Sequence
  Antisense Oligo
ucaucguggccugcuucgc

SEQ ID NO: 61405 - RNA, 19 nt, Artificial Sequence
  Sense Oligo
cgaagcaggccacgaugau

SEQ ID NO: 61406 - RNA, 19 nt, Artificial Sequence
  Antisense Oligo
aucaucguggccugcuucg

SEQ ID NO: 61407 - RNA, 19 nt, Artificial Sequence
  Sense Oligo
gaagcaggccacgaugaug

SEQ ID NO: 61408 - RNA, 19 nt, Artificial Sequence
  Antisense Oligo
caucaucguggccugcuuc

SEQ ID NO: 61409 - RNA, 19 nt, Artificial Sequence
  Sense Oligo
aagcaggccacgaugaugu

SEQ ID NO: 61410 - RNA, 19 nt, Artificial Sequence
  Antisense Oligo
acaucaucguggccugcuu

SEQ ID NO: 61411 - RNA, 19 nt, Artificial Sequence
  Sense Oligo
agcaggccacgaugaugug

SEQ ID NO: 61412 - RNA, 19 nt, Artificial Sequence
  Antisense Oligo
cacaucaucguggccugcu

SEQ ID NO: 61413 - RNA, 19 nt, Artificial Sequence
  Sense Oligo
aucuugucauguaauuggc

SEQ ID NO: 61414 - RNA, 19 nt, Artificial Sequence
  Antisense Oligo
gccaauuacaugacaagau

SEQ ID NO: 61415 - RNA, 19 nt, Artificial Sequence
  Sense Oligo
cuugucauguaauuggcug

SEQ ID NO: 61416 - RNA, 19 nt, Artificial Sequence
  Antisense Oligo
cagccaauuacaugacaag

SEQ ID NO: 61417 - RNA, 19 nt, Artificial Sequence
  Sense Oligo
uugucauguaauuggcugu

SEQ ID NO: 61418 - RNA, 19 nt, Artificial Sequence
  Antisense Oligo
acagccaauuacaugacaa

SEQ ID NO: 61419 - RNA, 19 nt, Artificial Sequence
  Sense Oligo
ugucauguaauuggcugug

SEQ ID NO: 61420 - RNA, 19 nt, Artificial Sequence
  Antisense Oligo
cacagccaauuacaugaca

SEQ ID NO: 61421 - RNA, 19 nt, Artificial Sequence
  Sense Oligo
uguaauuggcugugaggac

SEQ ID NO: 61422 - RNA, 19 nt, Artificial Sequence
  Antisense Oligo
guccucacagccaauuaca

SEQ ID NO: 61423 - RNA, 19 nt, Artificial Sequence
  Sense Oligo
guaauuggcugugaggacu

SEQ ID NO: 61424 - RNA, 19 nt, Artificial Sequence
  Antisense Oligo
aguccucacagccaauuac

SEQ ID NO: 61425 - RNA, 19 nt, Artificial Sequence
  Sense Oligo
uaauuggcugugaggacuc

SEQ ID NO: 61426 - RNA, 19 nt, Artificial Sequence
  Antisense Oligo
gaguccucacagccaauua

SEQ ID NO: 61427 - RNA, 19 nt, Artificial Sequence
  Sense Oligo
uauuuccauagaugguggg

SEQ ID NO: 61428 - RNA, 19 nt, Artificial Sequence
  Antisense Oligo
cccaccaucuauggaaaua

SEQ ID NO: 61429 - RNA, 19 nt, Artificial Sequence
  Sense Oligo
auuuccauagauggugggu

SEQ ID NO: 61430 - RNA, 19 nt, Artificial Sequence
  Antisense Oligo
acccaccaucuauggaaau

SEQ ID NO: 61431 - RNA, 19 nt, Artificial Sequence
  Sense Oligo
uuuccauagaugguggguu

SEQ ID NO: 61432 - RNA, 19 nt, Artificial Sequence
  Antisense Oligo
aacccaccaucuauggaaa

SEQ ID NO: 61433 - RNA, 19 nt, Artificial Sequence
  Sense Oligo
uuccauagaugguggguua

SEQ ID NO: 61434 - RNA, 19 nt, Artificial Sequence
  Antisense Oligo
uaacccaccaucuauggaa

SEQ ID NO: 61435 - RNA, 19 nt, Artificial Sequence
  Sense Oligo
uccauagaugguggguuaa

SEQ ID NO: 61436 - RNA, 19 nt, Artificial Sequence
  Antisense Oligo
uuaacccaccaucuaugga

SEQ ID NO: 61437 - RNA, 19 nt, Artificial Sequence
  Sense Oligo
ccauagaugguggguuaau

SEQ ID NO: 61438 - RNA, 19 nt, Artificial Sequence
  Antisense Oligo
auuaacccaccaucuaugg

SEQ ID NO: 61439 - RNA, 19 nt, Artificial Sequence
  Sense Oligo
cauagaugguggguuaaug

SEQ ID NO: 61440 - RNA, 19 nt, Artificial Sequence
  Antisense Oligo
cauuaacccaccaucuaug

SEQ ID NO: 61441 - RNA, 19 nt, Artificial Sequence
  Sense Oligo
auagaugguggguuaauga

SEQ ID NO: 61442 - RNA, 19 nt, Artificial Sequence
  Antisense Oligo
ucauuaacccaccaucuau

SEQ ID NO: 61443 - RNA, 19 nt, Artificial Sequence
  Sense Oligo
uagaugguggguuaaugac

SEQ ID NO: 61444 - RNA, 19 nt, Artificial Sequence
  Antisense Oligo
gucauuaacccaccaucua

SEQ ID NO: 61445 - RNA, 19 nt, Artificial Sequence
  Sense Oligo
cucuuagccaagggauaca

SEQ ID NO: 61446 - RNA, 19 nt, Artificial Sequence
  Antisense Oligo
uguaucccuuggcuaagag

SEQ ID NO: 61447 - RNA, 19 nt, Artificial Sequence
  Sense Oligo
ggcacuacgcugcaguuuu

SEQ ID NO: 61448 - RNA, 19 nt, Artificial Sequence
  Antisense Oligo
aaaacugcagcguagugcc

SEQ ID NO: 61449 - RNA, 19 nt, Artificial Sequence
  Sense Oligo
gcacuacgcugcaguuuuc

SEQ ID NO: 61450 - RNA, 19 nt, Artificial Sequence
  Antisense Oligo
gaaaacugcagcguagugc

SEQ ID NO: 61451 - RNA, 19 nt, Artificial Sequence
  Sense Oligo
cacuacgcugcaguuuucc

SEQ ID NO: 61452 - RNA, 19 nt, Artificial Sequence
  Antisense Oligo
ggaaaacugcagcguagug

SEQ ID NO: 61453 - RNA, 19 nt, Artificial Sequence
  Sense Oligo
acuacgcugcaguuuuccg

SEQ ID NO: 61454 - RNA, 19 nt, Artificial Sequence
  Antisense Oligo
cggaaaacugcagcguagu

SEQ ID NO: 61455 - RNA, 19 nt, Artificial Sequence
  Sense Oligo
cuacgcugcaguuuuccgg

SEQ ID NO: 61456 - RNA, 19 nt, Artificial Sequence
  Antisense Oligo
ccggaaaacugcagcguag

SEQ ID NO: 61457 - RNA, 19 nt, Artificial Sequence
  Sense Oligo
uacgcugcaguuuuccggc

SEQ ID NO: 61458 - RNA, 19 nt, Artificial Sequence
  Antisense Oligo
gccggaaaacugcagcgua

SEQ ID NO: 61459 - RNA, 19 nt, Artificial Sequence
  Sense Oligo
acgcugcaguuuuccggcu

SEQ ID NO: 61460 - RNA, 19 nt, Artificial Sequence
  Antisense Oligo
agccggaaaacugcagcgu

SEQ ID NO: 61461 - RNA, 19 nt, Artificial Sequence
  Sense Oligo
cgcugcaguuuuccggcug

SEQ ID NO: 61462 - RNA, 19 nt, Artificial Sequence
  Antisense Oligo
cagccggaaaacugcagcg

SEQ ID NO: 61463 - RNA, 19 nt, Artificial Sequence
  Sense Oligo
aguuuuccggcugcagauu

SEQ ID NO: 61464 - RNA, 19 nt, Artificial Sequence
  Antisense Oligo
aaucugcagccggaaaacu

SEQ ID NO: 61465 - RNA, 19 nt, Artificial Sequence
  Sense Oligo
guuuuccggcugcagauuc

SEQ ID NO: 61466 - RNA, 19 nt, Artificial Sequence
  Antisense Oligo
gaaucugcagccggaaaac

SEQ ID NO: 61467 - RNA, 19 nt, Artificial Sequence
  Sense Oligo
uuuuccggcugcagauucu

SEQ ID NO: 61468 - RNA, 19 nt, Artificial Sequence
  Antisense Oligo
agaaucugcagccggaaaa

SEQ ID NO: 61469 - RNA, 19 nt, Artificial Sequence
  Sense Oligo
uuuccggcugcagauucug

SEQ ID NO: 61470 - RNA, 19 nt, Artificial Sequence
  Antisense Oligo
cagaaucugcagccggaaa

SEQ ID NO: 61471 - RNA, 19 nt, Artificial Sequence
  Sense Oligo
uuccggcugcagauucugu

SEQ ID NO: 61472 - RNA, 19 nt, Artificial Sequence
  Antisense Oligo
acagaaucugcagccggaa

SEQ ID NO: 61473 - RNA, 19 nt, Artificial Sequence
  Sense Oligo
uccggcugcagauucuguu

SEQ ID NO: 61474 - RNA, 19 nt, Artificial Sequence
  Antisense Oligo
aacagaaucugcagccgga

SEQ ID NO: 61475 - RNA, 19 nt, Artificial Sequence
  Sense Oligo
ccggcugcagauucuguuu

SEQ ID NO: 61476 - RNA, 19 nt, Artificial Sequence
  Antisense Oligo
aaacagaaucugcagccgg

SEQ ID NO: 61477 - RNA, 19 nt, Artificial Sequence
  Sense Oligo
cggcugcagauucuguuug

SEQ ID NO: 61478 - RNA, 19 nt, Artificial Sequence
  Antisense Oligo
caaacagaaucugcagccg

SEQ ID NO: 61479 - RNA, 19 nt, Artificial Sequence
  Sense Oligo
cugcagauucuguuuguca

SEQ ID NO: 61480 - RNA, 19 nt, Artificial Sequence
  Antisense Oligo
ugacaaacagaaucugcag

SEQ ID NO: 61481 - RNA, 19 nt, Artificial Sequence
  Sense Oligo
gauucuguuugucaucugc

SEQ ID NO: 61482 - RNA, 19 nt, Artificial Sequence
  Antisense Oligo
gcagaugacaaacagaauc

SEQ ID NO: 61483 - RNA, 19 nt, Artificial Sequence
  Sense Oligo
auucuguuugucaucugcu

SEQ ID NO: 61484 - RNA, 19 nt, Artificial Sequence
  Antisense Oligo
agcagaugacaaacagaau

SEQ ID NO: 61485 - RNA, 19 nt, Artificial Sequence
  Sense Oligo
uuuucuuucccaauuuagg

SEQ ID NO: 61486 - RNA, 19 nt, Artificial Sequence
  Antisense Oligo
ccuaaauugggaaagaaaa

SEQ ID NO: 61487 - RNA, 19 nt, Artificial Sequence
  Sense Oligo
cccaauuuagggaauaccc

SEQ ID NO: 61488 - RNA, 19 nt, Artificial Sequence
  Antisense Oligo
ggguauucccuaaauuggg

SEQ ID NO: 61489 - RNA, 19 nt, Artificial Sequence
  Sense Oligo
ccaauuuagggaauaccca

SEQ ID NO: 61490 - RNA, 19 nt, Artificial Sequence
  Antisense Oligo
uggguauucccuaaauugg

SEQ ID NO: 61491 - RNA, 19 nt, Artificial Sequence
  Sense Oligo
caauuuagggaauacccac

SEQ ID NO: 61492 - RNA, 19 nt, Artificial Sequence
  Antisense Oligo
guggguauucccuaaauug

SEQ ID NO: 61493 - RNA, 19 nt, Artificial Sequence
  Sense Oligo
aauuuagggaauacccacu

SEQ ID NO: 61494 - RNA, 19 nt, Artificial Sequence
  Antisense Oligo
aguggguauucccuaaauu

SEQ ID NO: 61495 - RNA, 19 nt, Artificial Sequence
  Sense Oligo
auuuagggaauacccacuc

SEQ ID NO: 61496 - RNA, 19 nt, Artificial Sequence
  Antisense Oligo
gaguggguauucccuaaau

SEQ ID NO: 61497 - RNA, 19 nt, Artificial Sequence
  Sense Oligo
uuuagggaauacccacucu

SEQ ID NO: 61498 - RNA, 19 nt, Artificial Sequence
  Antisense Oligo
agaguggguauucccuaaa

SEQ ID NO: 61499 - RNA, 19 nt, Artificial Sequence
  Sense Oligo
gggaauacccacucuggug

SEQ ID NO: 61500 - RNA, 19 nt, Artificial Sequence
  Antisense Oligo
caccagaguggguauuccc

SEQ ID NO: 61501 - RNA, 19 nt, Artificial Sequence
  Sense Oligo
ggaauacccacucuggugu

SEQ ID NO: 61502 - RNA, 19 nt, Artificial Sequence
  Antisense Oligo
acaccagaguggguauucc

SEQ ID NO: 61503 - RNA, 19 nt, Artificial Sequence
  Sense Oligo
gaauacccacucuggugua

SEQ ID NO: 61504 - RNA, 19 nt, Artificial Sequence
  Antisense Oligo
uacaccagaguggguauuc

SEQ ID NO: 61505 - RNA, 19 nt, Artificial Sequence
  Sense Oligo
aauacccacucugguguac

SEQ ID NO: 61506 - RNA, 19 nt, Artificial Sequence
  Antisense Oligo
guacaccagaguggguauu

SEQ ID NO: 61507 - RNA, 19 nt, Artificial Sequence
  Sense Oligo
ucucuuuauggacaucaag

SEQ ID NO: 61508 - RNA, 19 nt, Artificial Sequence
  Antisense Oligo
cuugauguccauaaagaga

SEQ ID NO: 61509 - RNA, 19 nt, Artificial Sequence
  Sense Oligo
caaaauggcacaggugauc

SEQ ID NO: 61510 - RNA, 19 nt, Artificial Sequence
  Antisense Oligo
gaucaccugugccauuuug

SEQ ID NO: 61511 - RNA, 19 nt, Artificial Sequence
  Sense Oligo
aaaauggcacaggugaucc

SEQ ID NO: 61512 - RNA, 19 nt, Artificial Sequence
  Antisense Oligo
ggaucaccugugccauuuu

SEQ ID NO: 61513 - RNA, 19 nt, Artificial Sequence
  Sense Oligo
aaauggcacaggugauccc

SEQ ID NO: 61514 - RNA, 19 nt, Artificial Sequence
  Antisense Oligo
gggaucaccugugccauuu

SEQ ID NO: 61515 - RNA, 19 nt, Artificial Sequence
  Sense Oligo
aauggcacaggugaucccg

SEQ ID NO: 61516 - RNA, 19 nt, Artificial Sequence
  Antisense Oligo
cgggaucaccugugccauu

SEQ ID NO: 61517 - RNA, 19 nt, Artificial Sequence
  Sense Oligo
gcacaggugaucccgauaa

SEQ ID NO: 61518 - RNA, 19 nt, Artificial Sequence
  Antisense Oligo
uuaucgggaucaccugugc

SEQ ID NO: 61519 - RNA, 19 nt, Artificial Sequence
  Sense Oligo
cacaggugaucccgauaaa

SEQ ID NO: 61520 - RNA, 19 nt, Artificial Sequence
  Antisense Oligo
uuuaucgggaucaccugug

SEQ ID NO: 61521 - RNA, 19 nt, Artificial Sequence
  Sense Oligo
aaccugauccugugcacgg

SEQ ID NO: 61522 - RNA, 19 nt, Artificial Sequence
  Antisense Oligo
ccgugcacaggaucagguu

SEQ ID NO: 61523 - RNA, 19 nt, Artificial Sequence
  Sense Oligo
accugauccugugcacggg

SEQ ID NO: 61524 - RNA, 19 nt, Artificial Sequence
  Antisense Oligo
cccgugcacaggaucaggu

SEQ ID NO: 61525 - RNA, 19 nt, Artificial Sequence
  Sense Oligo
gggcuuucugccuucucag

SEQ ID NO: 61526 - RNA, 19 nt, Artificial Sequence
  Antisense Oligo
cugagaaggcagaaagccc

SEQ ID NO: 61527 - RNA, 19 nt, Artificial Sequence
  Sense Oligo
gcuuucugccuucucagug

SEQ ID NO: 61528 - RNA, 19 nt, Artificial Sequence
  Antisense Oligo
cacugagaaggcagaaagc

SEQ ID NO: 61529 - RNA, 19 nt, Artificial Sequence
  Sense Oligo
ucucaguguguuucccucc

SEQ ID NO: 61530 - RNA, 19 nt, Artificial Sequence
  Antisense Oligo
ggagggaaacacacugaga

SEQ ID NO: 61531 - RNA, 19 nt, Artificial Sequence
  Sense Oligo
cucaguguguuucccuccg

SEQ ID NO: 61532 - RNA, 19 nt, Artificial Sequence
  Antisense Oligo
cggagggaaacacacugag

SEQ ID NO: 61533 - RNA, 19 nt, Artificial Sequence
  Sense Oligo
ucaguguguuucccuccgu

SEQ ID NO: 61534 - RNA, 19 nt, Artificial Sequence
  Antisense Oligo
acggagggaaacacacuga

SEQ ID NO: 61535 - RNA, 19 nt, Artificial Sequence
  Sense Oligo
caguguguuucccuccgug

SEQ ID NO: 61536 - RNA, 19 nt, Artificial Sequence
  Antisense Oligo
cacggagggaaacacacug

SEQ ID NO: 61537 - RNA, 19 nt, Artificial Sequence
  Sense Oligo
aguguguuucccuccgugu

SEQ ID NO: 61538 - RNA, 19 nt, Artificial Sequence
  Antisense Oligo
acacggagggaaacacacu

SEQ ID NO: 61539 - RNA, 19 nt, Artificial Sequence
  Sense Oligo
guguguuucccuccguguu

SEQ ID NO: 61540 - RNA, 19 nt, Artificial Sequence
  Antisense Oligo
aacacggagggaaacacac

SEQ ID NO: 61541 - RNA, 19 nt, Artificial Sequence
  Sense Oligo
uguguuucccuccguguua

SEQ ID NO: 61542 - RNA, 19 nt, Artificial Sequence
  Antisense Oligo
uaacacggagggaaacaca

SEQ ID NO: 61543 - RNA, 19 nt, Artificial Sequence
  Sense Oligo
guguuucccuccguguuag

SEQ ID NO: 61544 - RNA, 19 nt, Artificial Sequence
  Antisense Oligo
cuaacacggagggaaacac

SEQ ID NO: 61545 - RNA, 19 nt, Artificial Sequence
  Sense Oligo
uguuucccuccguguuagg

SEQ ID NO: 61546 - RNA, 19 nt, Artificial Sequence
  Antisense Oligo
ccuaacacggagggaaaca

SEQ ID NO: 61547 - RNA, 19 nt, Artificial Sequence
  Sense Oligo
guuucccuccguguuaggc

SEQ ID NO: 61548 - RNA, 19 nt, Artificial Sequence
  Antisense Oligo
gccuaacacggagggaaac

SEQ ID NO: 61549 - RNA, 19 nt, Artificial Sequence
  Sense Oligo
uuucccuccguguuaggcc

SEQ ID NO: 61550 - RNA, 19 nt, Artificial Sequence
  Antisense Oligo
ggccuaacacggagggaaa

SEQ ID NO: 61551 - RNA, 19 nt, Artificial Sequence
  Sense Oligo
uucccuccguguuaggccu

SEQ ID NO: 61552 - RNA, 19 nt, Artificial Sequence
  Antisense Oligo
aggccuaacacggagggaa

SEQ ID NO: 61553 - RNA, 19 nt, Artificial Sequence
  Sense Oligo
ucccuccguguuaggccua

SEQ ID NO: 61554 - RNA, 19 nt, Artificial Sequence
  Antisense Oligo
uaggccuaacacggaggga

SEQ ID NO: 61555 - RNA, 19 nt, Artificial Sequence
  Sense Oligo
cccuccguguuaggccuac

SEQ ID NO: 61556 - RNA, 19 nt, Artificial Sequence
  Antisense Oligo
guaggccuaacacggaggg

SEQ ID NO: 61557 - RNA, 19 nt, Artificial Sequence
  Sense Oligo
ccuccguguuaggccuacu

SEQ ID NO: 61558 - RNA, 19 nt, Artificial Sequence
  Antisense Oligo
aguaggccuaacacggagg

SEQ ID NO: 61559 - RNA, 19 nt, Artificial Sequence
  Sense Oligo
cuccguguuaggccuacuc

SEQ ID NO: 61560 - RNA, 19 nt, Artificial Sequence
  Antisense Oligo
gaguaggccuaacacggag

SEQ ID NO: 61561 - RNA, 19 nt, Artificial Sequence
  Sense Oligo
uccguguuaggccuacucc

SEQ ID NO: 61562 - RNA, 19 nt, Artificial Sequence
  Antisense Oligo
ggaguaggccuaacacgga

SEQ ID NO: 61563 - RNA, 19 nt, Artificial Sequence
  Sense Oligo
guguuugcugugagcccac

SEQ ID NO: 61564 - RNA, 19 nt, Artificial Sequence
  Antisense Oligo
gugggcucacagcaaacac

SEQ ID NO: 61565 - RNA, 19 nt, Artificial Sequence
  Sense Oligo
ugagcccacaguuucugcg

SEQ ID NO: 61566 - RNA, 19 nt, Artificial Sequence
  Antisense Oligo
cgcagaaacugugggcuca

SEQ ID NO: 61567 - RNA, 19 nt, Artificial Sequence
  Sense Oligo
gagcccacaguuucugcgg

SEQ ID NO: 61568 - RNA, 19 nt, Artificial Sequence
  Antisense Oligo
ccgcagaaacugugggcuc

SEQ ID NO: 61569 - RNA, 19 nt, Artificial Sequence
  Sense Oligo
agagcaagcaagacagcaa

SEQ ID NO: 61570 - RNA, 19 nt, Artificial Sequence
  Antisense Oligo
uugcugucuugcuugcucu

SEQ ID NO: 61571 - RNA, 19 nt, Artificial Sequence
  Sense Oligo
gagcaagcaagacagcaaa

SEQ ID NO: 61572 - RNA, 19 nt, Artificial Sequence
  Antisense Oligo
uuugcugucuugcuugcuc

SEQ ID NO: 61573 - RNA, 19 nt, Artificial Sequence
  Sense Oligo
agcaagcaagacagcaaau

SEQ ID NO: 61574 - RNA, 19 nt, Artificial Sequence
  Antisense Oligo
auuugcugucuugcuugcu

SEQ ID NO: 61575 - RNA, 19 nt, Artificial Sequence
  Sense Oligo
gcaagcaagacagcaaauc

SEQ ID NO: 61576 - RNA, 19 nt, Artificial Sequence
  Antisense Oligo
gauuugcugucuugcuugc

SEQ ID NO: 61577 - RNA, 19 nt, Artificial Sequence
  Sense Oligo
caagcaagacagcaaauca

SEQ ID NO: 61578 - RNA, 19 nt, Artificial Sequence
  Antisense Oligo
ugauuugcugucuugcuug

SEQ ID NO: 61579 - RNA, 19 nt, Artificial Sequence
  Sense Oligo
uuucuuguagaguaaaagc

SEQ ID NO: 61580 - RNA, 19 nt, Artificial Sequence
  Antisense Oligo
gcuuuuacucuacaagaaa

SEQ ID NO: 61581 - RNA, 19 nt, Artificial Sequence
  Sense Oligo
ucuuguagaguaaaagcag

SEQ ID NO: 61582 - RNA, 19 nt, Artificial Sequence
  Antisense Oligo
cugcuuuuacucuacaaga

SEQ ID NO: 61583 - RNA, 19 nt, Artificial Sequence
  Sense Oligo
cuuguagaguaaaagcaga

SEQ ID NO: 61584 - RNA, 19 nt, Artificial Sequence
  Antisense Oligo
ucugcuuuuacucuacaag

SEQ ID NO: 61585 - RNA, 19 nt, Artificial Sequence
  Sense Oligo
uguagaguaaaagcagauu

SEQ ID NO: 61586 - RNA, 19 nt, Artificial Sequence
  Antisense Oligo
aaucugcuuuuacucuaca

SEQ ID NO: 61587 - RNA, 19 nt, Artificial Sequence
  Sense Oligo
guagaguaaaagcagauug

SEQ ID NO: 61588 - RNA, 19 nt, Artificial Sequence
  Antisense Oligo
caaucugcuuuuacucuac

SEQ ID NO: 61589 - RNA, 19 nt, Artificial Sequence
  Sense Oligo
uagaguaaaagcagauuga

SEQ ID NO: 61590 - RNA, 19 nt, Artificial Sequence
  Antisense Oligo
ucaaucugcuuuuacucua

SEQ ID NO: 61591 - RNA, 19 nt, Artificial Sequence
  Sense Oligo
agaguaaaagcagauugac

SEQ ID NO: 61592 - RNA, 19 nt, Artificial Sequence
  Antisense Oligo
gucaaucugcuuuuacucu

SEQ ID NO: 61593 - RNA, 19 nt, Artificial Sequence
  Sense Oligo
gaguaaaagcagauugaca

SEQ ID NO: 61594 - RNA, 19 nt, Artificial Sequence
  Antisense Oligo
ugucaaucugcuuuuacuc

SEQ ID NO: 61595 - RNA, 19 nt, Artificial Sequence
  Sense Oligo
aguaaaagcagauugacau

SEQ ID NO: 61596 - RNA, 19 nt, Artificial Sequence
  Antisense Oligo
augucaaucugcuuuuacu

SEQ ID NO: 61597 - RNA, 19 nt, Artificial Sequence
  Sense Oligo
gauugacaucuuguggguu

SEQ ID NO: 61598 - RNA, 19 nt, Artificial Sequence
  Antisense Oligo
aacccacaagaugucaauc

SEQ ID NO: 61599 - RNA, 19 nt, Artificial Sequence
  Sense Oligo
auugacaucuuguggguuu

SEQ ID NO: 61600 - RNA, 19 nt, Artificial Sequence
  Antisense Oligo
aaacccacaagaugucaau

SEQ ID NO: 61601 - RNA, 19 nt, Artificial Sequence
  Sense Oligo
acaucuuguggguuugauu

SEQ ID NO: 61602 - RNA, 19 nt, Artificial Sequence
  Antisense Oligo
aaucaaacccacaagaugu

SEQ ID NO: 61603 - RNA, 19 nt, Artificial Sequence
  Sense Oligo
cuuguggguuugauucuua

SEQ ID NO: 61604 - RNA, 19 nt, Artificial Sequence
  Antisense Oligo
uaagaaucaaacccacaag

SEQ ID NO: 61605 - RNA, 19 nt, Artificial Sequence
  Sense Oligo
uuguggguuugauucuuag

SEQ ID NO: 61606 - RNA, 19 nt, Artificial Sequence
  Antisense Oligo
cuaagaaucaaacccacaa

SEQ ID NO: 61607 - RNA, 19 nt, Artificial Sequence
  Sense Oligo
uguggguuugauucuuagg

SEQ ID NO: 61608 - RNA, 19 nt, Artificial Sequence
  Antisense Oligo
ccuaagaaucaaacccaca

SEQ ID NO: 61609 - RNA, 19 nt, Artificial Sequence
  Sense Oligo
guggguuugauucuuagga

SEQ ID NO: 61610 - RNA, 19 nt, Artificial Sequence
  Antisense Oligo
uccuaagaaucaaacccac

SEQ ID NO: 61611 - RNA, 19 nt, Artificial Sequence
  Sense Oligo
uuaggaaugauguugaugc

SEQ ID NO: 61612 - RNA, 19 nt, Artificial Sequence
  Antisense Oligo
gcaucaacaucauuccuaa

SEQ ID NO: 61613 - RNA, 19 nt, Artificial Sequence
  Sense Oligo
uaggaaugauguugaugca

SEQ ID NO: 61614 - RNA, 19 nt, Artificial Sequence
  Antisense Oligo
ugcaucaacaucauuccua

SEQ ID NO: 61615 - RNA, 19 nt, Artificial Sequence
  Sense Oligo
ggaaugauguugaugcaug

SEQ ID NO: 61616 - RNA, 19 nt, Artificial Sequence
  Antisense Oligo
caugcaucaacaucauucc

SEQ ID NO: 61617 - RNA, 19 nt, Artificial Sequence
  Sense Oligo
aaugauguugaugcauggc

SEQ ID NO: 61618 - RNA, 19 nt, Artificial Sequence
  Antisense Oligo
gccaugcaucaacaucauu

SEQ ID NO: 61619 - RNA, 19 nt, Artificial Sequence
  Sense Oligo
augauguugaugcauggcc

SEQ ID NO: 61620 - RNA, 19 nt, Artificial Sequence
  Antisense Oligo
ggccaugcaucaacaucau

SEQ ID NO: 61621 - RNA, 19 nt, Artificial Sequence
  Sense Oligo
ugauguugaugcauggcca

SEQ ID NO: 61622 - RNA, 19 nt, Artificial Sequence
  Antisense Oligo
uggccaugcaucaacauca

SEQ ID NO: 61623 - RNA, 19 nt, Artificial Sequence
  Sense Oligo
gauguugaugcauggccau

SEQ ID NO: 61624 - RNA, 19 nt, Artificial Sequence
  Antisense Oligo
auggccaugcaucaacauc

SEQ ID NO: 61625 - RNA, 19 nt, Artificial Sequence
  Sense Oligo
auguugaugcauggccaug

SEQ ID NO: 61626 - RNA, 19 nt, Artificial Sequence
  Antisense Oligo
cauggccaugcaucaacau

SEQ ID NO: 61627 - RNA, 19 nt, Artificial Sequence
  Sense Oligo
uggccaugccugcugaagc

SEQ ID NO: 61628 - RNA, 19 nt, Artificial Sequence
  Antisense Oligo
gcuucagcaggcauggcca

SEQ ID NO: 61629 - RNA, 19 nt, Artificial Sequence
  Sense Oligo
caugccugcugaagcggga

SEQ ID NO: 61630 - RNA, 19 nt, Artificial Sequence
  Antisense Oligo
ucccgcuucagcaggcaug

SEQ ID NO: 61631 - RNA, 19 nt, Artificial Sequence
  Sense Oligo
augccugcugaagcgggaa

SEQ ID NO: 61632 - RNA, 19 nt, Artificial Sequence
  Antisense Oligo
uucccgcuucagcaggcau

SEQ ID NO: 61633 - RNA, 19 nt, Artificial Sequence
  Sense Oligo
ugccugcugaagcgggaag

SEQ ID NO: 61634 - RNA, 19 nt, Artificial Sequence
  Antisense Oligo
cuucccgcuucagcaggca

SEQ ID NO: 61635 - RNA, 19 nt, Artificial Sequence
  Sense Oligo
gccugcugaagcgggaagu

SEQ ID NO: 61636 - RNA, 19 nt, Artificial Sequence
  Antisense Oligo
acuucccgcuucagcaggc

SEQ ID NO: 61637 - RNA, 19 nt, Artificial Sequence
  Sense Oligo
ccugcugaagcgggaaguc

SEQ ID NO: 61638 - RNA, 19 nt, Artificial Sequence
  Antisense Oligo
gacuucccgcuucagcagg

SEQ ID NO: 61639 - RNA, 19 nt, Artificial Sequence
  Sense Oligo
cugcugaagcgggaagucc

SEQ ID NO: 61640 - RNA, 19 nt, Artificial Sequence
  Antisense Oligo
ggacuucccgcuucagcag

SEQ ID NO: 61641 - RNA, 19 nt, Artificial Sequence
  Sense Oligo
ugcugaagcgggaagucca

SEQ ID NO: 61642 - RNA, 19 nt, Artificial Sequence
  Antisense Oligo
uggacuucccgcuucagca

SEQ ID NO: 61643 - RNA, 19 nt, Artificial Sequence
  Sense Oligo
gcugaagcgggaaguccau

SEQ ID NO: 61644 - RNA, 19 nt, Artificial Sequence
  Antisense Oligo
auggacuucccgcuucagc

SEQ ID NO: 61645 - RNA, 19 nt, Artificial Sequence
  Sense Oligo
aagcgggaaguccauggaa

SEQ ID NO: 61646 - RNA, 19 nt, Artificial Sequence
  Antisense Oligo
uuccauggacuucccgcuu

SEQ ID NO: 61647 - RNA, 19 nt, Artificial Sequence
  Sense Oligo
aaccgauuuguuccugcuc

SEQ ID NO: 61648 - RNA, 19 nt, Artificial Sequence
  Antisense Oligo
gagcaggaacaaaucgguu

SEQ ID NO: 61649 - RNA, 19 nt, Artificial Sequence
  Sense Oligo
accgauuuguuccugcucu

SEQ ID NO: 61650 - RNA, 19 nt, Artificial Sequence
  Antisense Oligo
agagcaggaacaaaucggu

SEQ ID NO: 61651 - RNA, 19 nt, Artificial Sequence
  Sense Oligo
uuguuccugcucuccgcau

SEQ ID NO: 61652 - RNA, 19 nt, Artificial Sequence
  Antisense Oligo
augcggagagcaggaacaa

SEQ ID NO: 61653 - RNA, 19 nt, Artificial Sequence
  Sense Oligo
uguuccugcucuccgcaug

SEQ ID NO: 61654 - RNA, 19 nt, Artificial Sequence
  Antisense Oligo
caugcggagagcaggaaca

SEQ ID NO: 61655 - RNA, 19 nt, Artificial Sequence
  Sense Oligo
guuccugcucuccgcaugc

SEQ ID NO: 61656 - RNA, 19 nt, Artificial Sequence
  Antisense Oligo
gcaugcggagagcaggaac

SEQ ID NO: 61657 - RNA, 19 nt, Artificial Sequence
  Sense Oligo
gguacugauagguagaccu

SEQ ID NO: 61658 - RNA, 19 nt, Artificial Sequence
  Antisense Oligo
aggucuaccuaucaguacc

SEQ ID NO: 61659 - RNA, 19 nt, Artificial Sequence
  Sense Oligo
guacugauagguagaccug

SEQ ID NO: 61660 - RNA, 19 nt, Artificial Sequence
  Antisense Oligo
caggucuaccuaucaguac

SEQ ID NO: 61661 - RNA, 19 nt, Artificial Sequence
  Sense Oligo
uacugauagguagaccugu

SEQ ID NO: 61662 - RNA, 19 nt, Artificial Sequence
  Antisense Oligo
acaggucuaccuaucagua

SEQ ID NO: 61663 - RNA, 19 nt, Artificial Sequence
  Sense Oligo
acugauagguagaccugug

SEQ ID NO: 61664 - RNA, 19 nt, Artificial Sequence
  Antisense Oligo
cacaggucuaccuaucagu

SEQ ID NO: 61665 - RNA, 19 nt, Artificial Sequence
  Sense Oligo
cugauagguagaccugugu

SEQ ID NO: 61666 - RNA, 19 nt, Artificial Sequence
  Antisense Oligo
acacaggucuaccuaucag

SEQ ID NO: 61667 - RNA, 19 nt, Artificial Sequence
  Sense Oligo
ugauagguagaccugugug

SEQ ID NO: 61668 - RNA, 19 nt, Artificial Sequence
  Antisense Oligo
cacacaggucuaccuauca

SEQ ID NO: 61669 - RNA, 19 nt, Artificial Sequence
  Sense Oligo
ccugugugucuccauggcc

SEQ ID NO: 61670 - RNA, 19 nt, Artificial Sequence
  Antisense Oligo
ggccauggagacacacagg

SEQ ID NO: 61671 - RNA, 19 nt, Artificial Sequence
  Sense Oligo
cugugugucuccauggccu

SEQ ID NO: 61672 - RNA, 19 nt, Artificial Sequence
  Antisense Oligo
aggccauggagacacacag

SEQ ID NO: 61673 - RNA, 19 nt, Artificial Sequence
  Sense Oligo
gucuccauggccuccagga

SEQ ID NO: 61674 - RNA, 19 nt, Artificial Sequence
  Antisense Oligo
uccuggaggccauggagac

SEQ ID NO: 61675 - RNA, 19 nt, Artificial Sequence
  Sense Oligo
ucuccauggccuccaggaa

SEQ ID NO: 61676 - RNA, 19 nt, Artificial Sequence
  Antisense Oligo
uuccuggaggccauggaga

SEQ ID NO: 61677 - RNA, 19 nt, Artificial Sequence
  Sense Oligo
cccaagugucagcuguuag

SEQ ID NO: 61678 - RNA, 19 nt, Artificial Sequence
  Antisense Oligo
cuaacagcugacacuuggg

SEQ ID NO: 61679 - RNA, 19 nt, Artificial Sequence
  Sense Oligo
ccaagugucagcuguuaga

SEQ ID NO: 61680 - RNA, 19 nt, Artificial Sequence
  Antisense Oligo
ucuaacagcugacacuugg

SEQ ID NO: 61681 - RNA, 19 nt, Artificial Sequence
  Sense Oligo
caagugucagcuguuagag

SEQ ID NO: 61682 - RNA, 19 nt, Artificial Sequence
  Antisense Oligo
cucuaacagcugacacuug

SEQ ID NO: 61683 - RNA, 19 nt, Artificial Sequence
  Sense Oligo
gggcucggcucucuuacca

SEQ ID NO: 61684 - RNA, 19 nt, Artificial Sequence
  Antisense Oligo
ugguaagagagccgagccc

SEQ ID NO: 61685 - RNA, 19 nt, Artificial Sequence
  Sense Oligo
ggcucggcucucuuaccag

SEQ ID NO: 61686 - RNA, 19 nt, Artificial Sequence
  Antisense Oligo
cugguaagagagccgagcc

SEQ ID NO: 61687 - RNA, 19 nt, Artificial Sequence
  Sense Oligo
gcucggcucucuuaccagg

SEQ ID NO: 61688 - RNA, 19 nt, Artificial Sequence
  Antisense Oligo
ccugguaagagagccgagc

SEQ ID NO: 61689 - RNA, 19 nt, Artificial Sequence
  Sense Oligo
cucggcucucuuaccaggu

SEQ ID NO: 61690 - RNA, 19 nt, Artificial Sequence
  Antisense Oligo
accugguaagagagccgag

SEQ ID NO: 61691 - RNA, 19 nt, Artificial Sequence
  Sense Oligo
ucggcucucuuaccaggug

SEQ ID NO: 61692 - RNA, 19 nt, Artificial Sequence
  Antisense Oligo
caccugguaagagagccga

SEQ ID NO: 61693 - RNA, 19 nt, Artificial Sequence
  Sense Oligo
cggcucucuuaccaggugg

SEQ ID NO: 61694 - RNA, 19 nt, Artificial Sequence
  Antisense Oligo
ccaccugguaagagagccg

SEQ ID NO: 61695 - RNA, 19 nt, Artificial Sequence
  Sense Oligo
ggcucucuuaccagguggu

SEQ ID NO: 61696 - RNA, 19 nt, Artificial Sequence
  Antisense Oligo
accaccugguaagagagcc

SEQ ID NO: 61697 - RNA, 19 nt, Artificial Sequence
  Sense Oligo
gcucucuuaccagguggug

SEQ ID NO: 61698 - RNA, 19 nt, Artificial Sequence
  Antisense Oligo
caccaccugguaagagagc

SEQ ID NO: 61699 - RNA, 19 nt, Artificial Sequence
  Sense Oligo
cucucuuaccaggugguga

SEQ ID NO: 61700 - RNA, 19 nt, Artificial Sequence
  Antisense Oligo
ucaccaccugguaagagag

SEQ ID NO: 61701 - RNA, 19 nt, Artificial Sequence
  Sense Oligo
ucucuuaccagguggugag

SEQ ID NO: 61702 - RNA, 19 nt, Artificial Sequence
  Antisense Oligo
cucaccaccugguaagaga

SEQ ID NO: 61703 - RNA, 19 nt, Artificial Sequence
  Sense Oligo
gcccacagacaucccucuc

SEQ ID NO: 61704 - RNA, 19 nt, Artificial Sequence
  Antisense Oligo
gagagggaugucugugggc

SEQ ID NO: 61705 - RNA, 19 nt, Artificial Sequence
  Sense Oligo
acagacaucccucuccugc

SEQ ID NO: 61706 - RNA, 19 nt, Artificial Sequence
  Antisense Oligo
gcaggagagggaugucugu

SEQ ID NO: 61707 - RNA, 19 nt, Artificial Sequence
  Sense Oligo
cagacaucccucuccugcu

SEQ ID NO: 61708 - RNA, 19 nt, Artificial Sequence
  Antisense Oligo
agcaggagagggaugucug

SEQ ID NO: 61709 - RNA, 19 nt, Artificial Sequence
  Sense Oligo
agacaucccucuccugcuu

SEQ ID NO: 61710 - RNA, 19 nt, Artificial Sequence
  Antisense Oligo
aagcaggagagggaugucu

SEQ ID NO: 61711 - RNA, 19 nt, Artificial Sequence
  Sense Oligo
acaucccucuccugcuuuu

SEQ ID NO: 61712 - RNA, 19 nt, Artificial Sequence
  Antisense Oligo
aaaagcaggagagggaugu

SEQ ID NO: 61713 - RNA, 19 nt, Artificial Sequence
  Sense Oligo
aucccucuccugcuuuuca

SEQ ID NO: 61714 - RNA, 19 nt, Artificial Sequence
  Antisense Oligo
ugaaaagcaggagagggau

SEQ ID NO: 61715 - RNA, 19 nt, Artificial Sequence
  Sense Oligo
ucccucuccugcuuuucau

SEQ ID NO: 61716 - RNA, 19 nt, Artificial Sequence
  Antisense Oligo
augaaaagcaggagaggga

SEQ ID NO: 61717 - RNA, 19 nt, Artificial Sequence
  Sense Oligo
cccucuccugcuuuucauu

SEQ ID NO: 61718 - RNA, 19 nt, Artificial Sequence
  Antisense Oligo
aaugaaaagcaggagaggg

SEQ ID NO: 61719 - RNA, 19 nt, Artificial Sequence
  Sense Oligo
gcuuuucauuucccaggac

SEQ ID NO: 61720 - RNA, 19 nt, Artificial Sequence
  Antisense Oligo
guccugggaaaugaaaagc

SEQ ID NO: 61721 - RNA, 19 nt, Artificial Sequence
  Sense Oligo
uuuucauuucccaggacuc

SEQ ID NO: 61722 - RNA, 19 nt, Artificial Sequence
  Antisense Oligo
gaguccugggaaaugaaaa

SEQ ID NO: 61723 - RNA, 19 nt, Artificial Sequence
  Sense Oligo
uuucauuucccaggacucc

SEQ ID NO: 61724 - RNA, 19 nt, Artificial Sequence
  Antisense Oligo
ggaguccugggaaaugaaa

SEQ ID NO: 61725 - RNA, 19 nt, Artificial Sequence
  Sense Oligo
ucauuucccaggacucccu

SEQ ID NO: 61726 - RNA, 19 nt, Artificial Sequence
  Antisense Oligo
agggaguccugggaaauga

SEQ ID NO: 61727 - RNA, 19 nt, Artificial Sequence
  Sense Oligo
auuucccaggacucccucc

SEQ ID NO: 61728 - RNA, 19 nt, Artificial Sequence
  Antisense Oligo
ggagggaguccugggaaau

SEQ ID NO: 61729 - RNA, 19 nt, Artificial Sequence
  Sense Oligo
uuucccaggacucccuccc

SEQ ID NO: 61730 - RNA, 19 nt, Artificial Sequence
  Antisense Oligo
gggagggaguccugggaaa

SEQ ID NO: 61731 - RNA, 19 nt, Artificial Sequence
  Sense Oligo
cccagcucggucauuagug

SEQ ID NO: 61732 - RNA, 19 nt, Artificial Sequence
  Antisense Oligo
cacuaaugaccgagcuggg

SEQ ID NO: 61733 - RNA, 19 nt, Artificial Sequence
  Sense Oligo
ccagcucggucauuagugc

SEQ ID NO: 61734 - RNA, 19 nt, Artificial Sequence
  Antisense Oligo
gcacuaaugaccgagcugg

SEQ ID NO: 61735 - RNA, 19 nt, Artificial Sequence
  Sense Oligo
cagcucggucauuagugcc

SEQ ID NO: 61736 - RNA, 19 nt, Artificial Sequence
  Antisense Oligo
ggcacuaaugaccgagcug

SEQ ID NO: 61737 - RNA, 19 nt, Artificial Sequence
  Sense Oligo
agcucggucauuagugcca

SEQ ID NO: 61738 - RNA, 19 nt, Artificial Sequence
  Antisense Oligo
uggcacuaaugaccgagcu

SEQ ID NO: 61739 - RNA, 19 nt, Artificial Sequence
  Sense Oligo
ucauuagugccaucagugg

SEQ ID NO: 61740 - RNA, 19 nt, Artificial Sequence
  Antisense Oligo
ccacugauggcacuaauga

SEQ ID NO: 61741 - RNA, 19 nt, Artificial Sequence
  Sense Oligo
cauuagugccaucagugga

SEQ ID NO: 61742 - RNA, 19 nt, Artificial Sequence
  Antisense Oligo
uccacugauggcacuaaug

SEQ ID NO: 61743 - RNA, 19 nt, Artificial Sequence
  Sense Oligo
auuagugccaucaguggac

SEQ ID NO: 61744 - RNA, 19 nt, Artificial Sequence
  Antisense Oligo
guccacugauggcacuaau

SEQ ID NO: 61745 - RNA, 19 nt, Artificial Sequence
  Sense Oligo
uuagugccaucaguggaca

SEQ ID NO: 61746 - RNA, 19 nt, Artificial Sequence
  Antisense Oligo
uguccacugauggcacuaa

SEQ ID NO: 61747 - RNA, 19 nt, Artificial Sequence
  Sense Oligo
uagugccaucaguggacag

SEQ ID NO: 61748 - RNA, 19 nt, Artificial Sequence
  Antisense Oligo
cuguccacugauggcacua

SEQ ID NO: 61749 - RNA, 19 nt, Artificial Sequence
  Sense Oligo
agugccaucaguggacagc

SEQ ID NO: 61750 - RNA, 19 nt, Artificial Sequence
  Antisense Oligo
gcuguccacugauggcacu

SEQ ID NO: 61751 - RNA, 19 nt, Artificial Sequence
  Sense Oligo
gugccaucaguggacagcu

SEQ ID NO: 61752 - RNA, 19 nt, Artificial Sequence
  Antisense Oligo
agcuguccacugauggcac

SEQ ID NO: 61753 - RNA, 19 nt, Artificial Sequence
  Sense Oligo
ugccaucaguggacagcug

SEQ ID NO: 61754 - RNA, 19 nt, Artificial Sequence
  Antisense Oligo
cagcuguccacugauggca

SEQ ID NO: 61755 - RNA, 19 nt, Artificial Sequence
  Sense Oligo
gccaucaguggacagcugc

SEQ ID NO: 61756 - RNA, 19 nt, Artificial Sequence
  Antisense Oligo
gcagcuguccacugauggc

SEQ ID NO: 61757 - RNA, 19 nt, Artificial Sequence
  Sense Oligo
ccaucaguggacagcugca

SEQ ID NO: 61758 - RNA, 19 nt, Artificial Sequence
  Antisense Oligo
ugcagcuguccacugaugg

SEQ ID NO: 61759 - RNA, 19 nt, Artificial Sequence
  Sense Oligo
cugcaguccuacagcgaug

SEQ ID NO: 61760 - RNA, 19 nt, Artificial Sequence
  Antisense Oligo
caucgcuguaggacugcag

SEQ ID NO: 61761 - RNA, 19 nt, Artificial Sequence
  Sense Oligo
ugcaguccuacagcgaugc

SEQ ID NO: 61762 - RNA, 19 nt, Artificial Sequence
  Antisense Oligo
gcaucgcuguaggacugca

SEQ ID NO: 61763 - RNA, 19 nt, Artificial Sequence
  Sense Oligo
gcaguccuacagcgaugcc

SEQ ID NO: 61764 - RNA, 19 nt, Artificial Sequence
  Antisense Oligo
ggcaucgcuguaggacugc

SEQ ID NO: 61765 - RNA, 19 nt, Artificial Sequence
  Sense Oligo
caguccuacagcgaugccu

SEQ ID NO: 61766 - RNA, 19 nt, Artificial Sequence
  Antisense Oligo
aggcaucgcuguaggacug

SEQ ID NO: 61767 - RNA, 19 nt, Artificial Sequence
  Sense Oligo
aguccuacagcgaugccug

SEQ ID NO: 61768 - RNA, 19 nt, Artificial Sequence
  Antisense Oligo
caggcaucgcuguaggacu

SEQ ID NO: 61769 - RNA, 19 nt, Artificial Sequence
  Sense Oligo
cagcgaugccugugaagug

SEQ ID NO: 61770 - RNA, 19 nt, Artificial Sequence
  Antisense Oligo
cacuucacaggcaucgcug

SEQ ID NO: 61771 - RNA, 19 nt, Artificial Sequence
  Sense Oligo
agcgaugccugugaagugc

SEQ ID NO: 61772 - RNA, 19 nt, Artificial Sequence
  Antisense Oligo
gcacuucacaggcaucgcu

SEQ ID NO: 61773 - RNA, 19 nt, Artificial Sequence
  Sense Oligo
gcgaugccugugaagugcu

SEQ ID NO: 61774 - RNA, 19 nt, Artificial Sequence
  Antisense Oligo
agcacuucacaggcaucgc

SEQ ID NO: 61775 - RNA, 19 nt, Artificial Sequence
  Sense Oligo
ugccugugaagugcugucu

SEQ ID NO: 61776 - RNA, 19 nt, Artificial Sequence
  Antisense Oligo
agacagcacuucacaggca

SEQ ID NO: 61777 - RNA, 19 nt, Artificial Sequence
  Sense Oligo
gccugugaagugcugucug

SEQ ID NO: 61778 - RNA, 19 nt, Artificial Sequence
  Antisense Oligo
cagacagcacuucacaggc

SEQ ID NO: 61779 - RNA, 19 nt, Artificial Sequence
  Sense Oligo
ggguuucugagcacagcug

SEQ ID NO: 61780 - RNA, 19 nt, Artificial Sequence
  Antisense Oligo
cagcugugcucagaaaccc

SEQ ID NO: 61781 - RNA, 19 nt, Artificial Sequence
  Sense Oligo
uuucugagcacagcuggug

SEQ ID NO: 61782 - RNA, 19 nt, Artificial Sequence
  Antisense Oligo
caccagcugugcucagaaa

SEQ ID NO: 61783 - RNA, 19 nt, Artificial Sequence
  Sense Oligo
uucugagcacagcuggugg

SEQ ID NO: 61784 - RNA, 19 nt, Artificial Sequence
  Antisense Oligo
ccaccagcugugcucagaa

SEQ ID NO: 61785 - RNA, 19 nt, Artificial Sequence
  Sense Oligo
ucugagcacagcugguggg

SEQ ID NO: 61786 - RNA, 19 nt, Artificial Sequence
  Antisense Oligo
cccaccagcugugcucaga

SEQ ID NO: 61787 - RNA, 19 nt, Artificial Sequence
  Sense Oligo
cugaauguguauacucaag

SEQ ID NO: 61788 - RNA, 19 nt, Artificial Sequence
  Antisense Oligo
cuugaguauacacauucag

SEQ ID NO: 61789 - RNA, 19 nt, Artificial Sequence
  Sense Oligo
ugaauguguauacucaaga

SEQ ID NO: 61790 - RNA, 19 nt, Artificial Sequence
  Antisense Oligo
ucuugaguauacacauuca

SEQ ID NO: 61791 - RNA, 19 nt, Artificial Sequence
  Sense Oligo
guauacucaagacauccug

SEQ ID NO: 61792 - RNA, 19 nt, Artificial Sequence
  Antisense Oligo
caggaugucuugaguauac

SEQ ID NO: 61793 - RNA, 19 nt, Artificial Sequence
  Sense Oligo
uauacucaagacauccugc

SEQ ID NO: 61794 - RNA, 19 nt, Artificial Sequence
  Antisense Oligo
gcaggaugucuugaguaua

SEQ ID NO: 61795 - RNA, 19 nt, Artificial Sequence
  Sense Oligo
auacucaagacauccugca

SEQ ID NO: 61796 - RNA, 19 nt, Artificial Sequence
  Antisense Oligo
ugcaggaugucuugaguau

SEQ ID NO: 61797 - RNA, 19 nt, Artificial Sequence
  Sense Oligo
uacucaagacauccugcaa

SEQ ID NO: 61798 - RNA, 19 nt, Artificial Sequence
  Antisense Oligo
uugcaggaugucuugagua

SEQ ID NO: 61799 - RNA, 19 nt, Artificial Sequence
  Sense Oligo
acucaagacauccugcaaa

SEQ ID NO: 61800 - RNA, 19 nt, Artificial Sequence
  Antisense Oligo
uuugcaggaugucuugagu

SEQ ID NO: 61801 - RNA, 19 nt, Artificial Sequence
  Sense Oligo
cucaagacauccugcaaau

SEQ ID NO: 61802 - RNA, 19 nt, Artificial Sequence
  Antisense Oligo
auuugcaggaugucuugag

SEQ ID NO: 61803 - RNA, 19 nt, Artificial Sequence
  Sense Oligo
ucaagacauccugcaaaug

SEQ ID NO: 61804 - RNA, 19 nt, Artificial Sequence
  Antisense Oligo
cauuugcaggaugucuuga

SEQ ID NO: 61805 - RNA, 19 nt, Artificial Sequence
  Sense Oligo
caagacauccugcaaaugg

SEQ ID NO: 61806 - RNA, 19 nt, Artificial Sequence
  Antisense Oligo
ccauuugcaggaugucuug

SEQ ID NO: 61807 - RNA, 19 nt, Artificial Sequence
  Sense Oligo
aagacauccugcaaauggg

SEQ ID NO: 61808 - RNA, 19 nt, Artificial Sequence
  Antisense Oligo
cccauuugcaggaugucuu

SEQ ID NO: 61809 - RNA, 19 nt, Artificial Sequence
  Sense Oligo
agacauccugcaaaugggu

SEQ ID NO: 61810 - RNA, 19 nt, Artificial Sequence
  Antisense Oligo
acccauuugcaggaugucu

SEQ ID NO: 61811 - RNA, 19 nt, Artificial Sequence
  Sense Oligo
gacauccugcaaaugggug

SEQ ID NO: 61812 - RNA, 19 nt, Artificial Sequence
  Antisense Oligo
cacccauuugcaggauguc

SEQ ID NO: 61813 - RNA, 19 nt, Artificial Sequence
  Sense Oligo
acauccugcaaauggguga

SEQ ID NO: 61814 - RNA, 19 nt, Artificial Sequence
  Antisense Oligo
ucacccauuugcaggaugu

SEQ ID NO: 61815 - RNA, 19 nt, Artificial Sequence
  Sense Oligo
cauccugcaaaugggugau

SEQ ID NO: 61816 - RNA, 19 nt, Artificial Sequence
  Antisense Oligo
aucacccauuugcaggaug

SEQ ID NO: 61817 - RNA, 19 nt, Artificial Sequence
  Sense Oligo
auccugcaaaugggugauc

SEQ ID NO: 61818 - RNA, 19 nt, Artificial Sequence
  Antisense Oligo
gaucacccauuugcaggau

SEQ ID NO: 61819 - RNA, 19 nt, Artificial Sequence
  Sense Oligo
uccugcaaaugggugauca

SEQ ID NO: 61820 - RNA, 19 nt, Artificial Sequence
  Antisense Oligo
ugaucacccauuugcagga

SEQ ID NO: 61821 - RNA, 19 nt, Artificial Sequence
  Sense Oligo
gcaaaugggugaucagacg

SEQ ID NO: 61822 - RNA, 19 nt, Artificial Sequence
  Antisense Oligo
cgucugaucacccauuugc

SEQ ID NO: 61823 - RNA, 19 nt, Artificial Sequence
  Sense Oligo
caaaugggugaucagacga

SEQ ID NO: 61824 - RNA, 19 nt, Artificial Sequence
  Antisense Oligo
ucgucugaucacccauuug

SEQ ID NO: 61825 - RNA, 19 nt, Artificial Sequence
  Sense Oligo
aaaugggugaucagacgau

SEQ ID NO: 61826 - RNA, 19 nt, Artificial Sequence
  Antisense Oligo
aucgucugaucacccauuu

SEQ ID NO: 61827 - RNA, 19 nt, Artificial Sequence
  Sense Oligo
aaugggugaucagacgauu

SEQ ID NO: 61828 - RNA, 19 nt, Artificial Sequence
  Antisense Oligo
aaucgucugaucacccauu

SEQ ID NO: 61829 - RNA, 19 nt, Artificial Sequence
  Sense Oligo
augggugaucagacgauuc

SEQ ID NO: 61830 - RNA, 19 nt, Artificial Sequence
  Antisense Oligo
gaaucgucugaucacccau

SEQ ID NO: 61831 - RNA, 19 nt, Artificial Sequence
  Sense Oligo
ugggugaucagacgauuca

SEQ ID NO: 61832 - RNA, 19 nt, Artificial Sequence
  Antisense Oligo
ugaaucgucugaucaccca

SEQ ID NO: 61833 - RNA, 19 nt, Artificial Sequence
  Sense Oligo
ugaucagacgauucacgug

SEQ ID NO: 61834 - RNA, 19 nt, Artificial Sequence
  Antisense Oligo
cacgugaaucgucugauca

SEQ ID NO: 61835 - RNA, 19 nt, Artificial Sequence
  Sense Oligo
gaucagacgauucacgugu

SEQ ID NO: 61836 - RNA, 19 nt, Artificial Sequence
  Antisense Oligo
acacgugaaucgucugauc

SEQ ID NO: 61837 - RNA, 19 nt, Artificial Sequence
  Sense Oligo
aucagacgauucacguguu

SEQ ID NO: 61838 - RNA, 19 nt, Artificial Sequence
  Antisense Oligo
aacacgugaaucgucugau

SEQ ID NO: 61839 - RNA, 19 nt, Artificial Sequence
  Sense Oligo
ucagacgauucacguguua

SEQ ID NO: 61840 - RNA, 19 nt, Artificial Sequence
  Antisense Oligo
uaacacgugaaucgucuga

SEQ ID NO: 61841 - RNA, 19 nt, Artificial Sequence
  Sense Oligo
cagacgauucacguguuaa

SEQ ID NO: 61842 - RNA, 19 nt, Artificial Sequence
  Antisense Oligo
uuaacacgugaaucgucug

SEQ ID NO: 61843 - RNA, 19 nt, Artificial Sequence
  Sense Oligo
agacgauucacguguuaaa

SEQ ID NO: 61844 - RNA, 19 nt, Artificial Sequence
  Antisense Oligo
uuuaacacgugaaucgucu

SEQ ID NO: 61845 - RNA, 19 nt, Artificial Sequence
  Sense Oligo
gacgauucacguguuaaag

SEQ ID NO: 61846 - RNA, 19 nt, Artificial Sequence
  Antisense Oligo
cuuuaacacgugaaucguc

SEQ ID NO: 61847 - RNA, 19 nt, Artificial Sequence
  Sense Oligo
acgauucacguguuaaagg

SEQ ID NO: 61848 - RNA, 19 nt, Artificial Sequence
  Antisense Oligo
ccuuuaacacgugaaucgu

SEQ ID NO: 61849 - RNA, 19 nt, Artificial Sequence
  Sense Oligo
cgauucacguguuaaaggu

SEQ ID NO: 61850 - RNA, 19 nt, Artificial Sequence
  Antisense Oligo
accuuuaacacgugaaucg

SEQ ID NO: 61851 - RNA, 19 nt, Artificial Sequence
  Sense Oligo
gauucacguguuaaaggug

SEQ ID NO: 61852 - RNA, 19 nt, Artificial Sequence
  Antisense Oligo
caccuuuaacacgugaauc

SEQ ID NO: 61853 - RNA, 19 nt, Artificial Sequence
  Sense Oligo
auucacguguuaaaggugg

SEQ ID NO: 61854 - RNA, 19 nt, Artificial Sequence
  Antisense Oligo
ccaccuuuaacacgugaau

SEQ ID NO: 61855 - RNA, 19 nt, Artificial Sequence
  Sense Oligo
uucacguguuaaagguggg

SEQ ID NO: 61856 - RNA, 19 nt, Artificial Sequence
  Antisense Oligo
cccaccuuuaacacgugaa

SEQ ID NO: 61857 - RNA, 19 nt, Artificial Sequence
  Sense Oligo
ucacguguuaaaggugggu

SEQ ID NO: 61858 - RNA, 19 nt, Artificial Sequence
  Antisense Oligo
acccaccuuuaacacguga

SEQ ID NO: 61859 - RNA, 19 nt, Artificial Sequence
  Sense Oligo
cacguguuaaagguggguc

SEQ ID NO: 61860 - RNA, 19 nt, Artificial Sequence
  Antisense Oligo
gacccaccuuuaacacgug

SEQ ID NO: 61861 - RNA, 19 nt, Artificial Sequence
  Sense Oligo
acguguuaaaggugggucu

SEQ ID NO: 61862 - RNA, 19 nt, Artificial Sequence
  Antisense Oligo
agacccaccuuuaacacgu

SEQ ID NO: 61863 - RNA, 19 nt, Artificial Sequence
  Sense Oligo
cguguuaaaggugggucuc

SEQ ID NO: 61864 - RNA, 19 nt, Artificial Sequence
  Antisense Oligo
gagacccaccuuuaacacg

SEQ ID NO: 61865 - RNA, 19 nt, Artificial Sequence
  Sense Oligo
guguuaaaggugggucuca

SEQ ID NO: 61866 - RNA, 19 nt, Artificial Sequence
  Antisense Oligo
ugagacccaccuuuaacac

SEQ ID NO: 61867 - RNA, 19 nt, Artificial Sequence
  Sense Oligo
uguuaaaggugggucucac

SEQ ID NO: 61868 - RNA, 19 nt, Artificial Sequence
  Antisense Oligo
gugagacccaccuuuaaca

SEQ ID NO: 61869 - RNA, 19 nt, Artificial Sequence
  Sense Oligo
guuaaaggugggucucaca

SEQ ID NO: 61870 - RNA, 19 nt, Artificial Sequence
  Antisense Oligo
ugugagacccaccuuuaac

SEQ ID NO: 61871 - RNA, 19 nt, Artificial Sequence
  Sense Oligo
uuaaaggugggucucacac

SEQ ID NO: 61872 - RNA, 19 nt, Artificial Sequence
  Antisense Oligo
gugugagacccaccuuuaa

SEQ ID NO: 61873 - RNA, 19 nt, Artificial Sequence
  Sense Oligo
acccuggucuccugcuucc

SEQ ID NO: 61874 - RNA, 19 nt, Artificial Sequence
  Antisense Oligo
ggaagcaggagaccagggu

SEQ ID NO: 61875 - RNA, 19 nt, Artificial Sequence
  Sense Oligo
cacucuaggcgcuccugaa

SEQ ID NO: 61876 - RNA, 19 nt, Artificial Sequence
  Antisense Oligo
uucaggagcgccuagagug

SEQ ID NO: 61877 - RNA, 19 nt, Artificial Sequence
  Sense Oligo
cugcucacccagucagucc

SEQ ID NO: 61878 - RNA, 19 nt, Artificial Sequence
  Antisense Oligo
ggacugacugggugagcag

SEQ ID NO: 61879 - RNA, 19 nt, Artificial Sequence
  Sense Oligo
ugcucacccagucagucca

SEQ ID NO: 61880 - RNA, 19 nt, Artificial Sequence
  Antisense Oligo
uggacugacugggugagca

SEQ ID NO: 61881 - RNA, 19 nt, Artificial Sequence
  Sense Oligo
acccagucaguccagcaua

SEQ ID NO: 61882 - RNA, 19 nt, Artificial Sequence
  Antisense Oligo
uaugcuggacugacugggu

SEQ ID NO: 61883 - RNA, 19 nt, Artificial Sequence
  Sense Oligo
cccagucaguccagcauaa

SEQ ID NO: 61884 - RNA, 19 nt, Artificial Sequence
  Antisense Oligo
uuaugcuggacugacuggg

SEQ ID NO: 61885 - RNA, 19 nt, Artificial Sequence
  Sense Oligo
ccagucaguccagcauaaa

SEQ ID NO: 61886 - RNA, 19 nt, Artificial Sequence
  Antisense Oligo
uuuaugcuggacugacugg

SEQ ID NO: 61887 - RNA, 19 nt, Artificial Sequence
  Sense Oligo
cacaccagggacaguagag

SEQ ID NO: 61888 - RNA, 19 nt, Artificial Sequence
  Antisense Oligo
cucuacugucccuggugug

SEQ ID NO: 61889 - RNA, 19 nt, Artificial Sequence
  Sense Oligo
aaaugccagcagucuagau

SEQ ID NO: 61890 - RNA, 19 nt, Artificial Sequence
  Antisense Oligo
aucuagacugcuggcauuu

SEQ ID NO: 61891 - RNA, 19 nt, Artificial Sequence
  Sense Oligo
aaugccagcagucuagaua

SEQ ID NO: 61892 - RNA, 19 nt, Artificial Sequence
  Antisense Oligo
uaucuagacugcuggcauu

SEQ ID NO: 61893 - RNA, 19 nt, Artificial Sequence
  Sense Oligo
augccagcagucuagauag

SEQ ID NO: 61894 - RNA, 19 nt, Artificial Sequence
  Antisense Oligo
cuaucuagacugcuggcau

SEQ ID NO: 61895 - RNA, 19 nt, Artificial Sequence
  Sense Oligo
ugccagcagucuagauaga

SEQ ID NO: 61896 - RNA, 19 nt, Artificial Sequence
  Antisense Oligo
ucuaucuagacugcuggca

SEQ ID NO: 61897 - RNA, 19 nt, Artificial Sequence
  Sense Oligo
gccagcagucuagauagag

SEQ ID NO: 61898 - RNA, 19 nt, Artificial Sequence
  Antisense Oligo
cucuaucuagacugcuggc

SEQ ID NO: 61899 - RNA, 19 nt, Artificial Sequence
  Sense Oligo
ccagcagucuagauagagc

SEQ ID NO: 61900 - RNA, 19 nt, Artificial Sequence
  Antisense Oligo
gcucuaucuagacugcugg

SEQ ID NO: 61901 - RNA, 19 nt, Artificial Sequence
  Sense Oligo
cagucuagauagagcccaa

SEQ ID NO: 61902 - RNA, 19 nt, Artificial Sequence
  Antisense Oligo
uugggcucuaucuagacug

SEQ ID NO: 61903 - RNA, 19 nt, Artificial Sequence
  Sense Oligo
agucuagauagagcccaaa

SEQ ID NO: 61904 - RNA, 19 nt, Artificial Sequence
  Antisense Oligo
uuugggcucuaucuagacu

SEQ ID NO: 61905 - RNA, 19 nt, Artificial Sequence
  Sense Oligo
gucuagauagagcccaaau

SEQ ID NO: 61906 - RNA, 19 nt, Artificial Sequence
  Antisense Oligo
auuugggcucuaucuagac

SEQ ID NO: 61907 - RNA, 19 nt, Artificial Sequence
  Sense Oligo
ucuagauagagcccaaaug

SEQ ID NO: 61908 - RNA, 19 nt, Artificial Sequence
  Antisense Oligo
cauuugggcucuaucuaga

SEQ ID NO: 61909 - RNA, 19 nt, Artificial Sequence
  Sense Oligo
cuagauagagcccaaaugu

SEQ ID NO: 61910 - RNA, 19 nt, Artificial Sequence
  Antisense Oligo
acauuugggcucuaucuag

SEQ ID NO: 61911 - RNA, 19 nt, Artificial Sequence
  Sense Oligo
uagauagagcccaaaugug

SEQ ID NO: 61912 - RNA, 19 nt, Artificial Sequence
  Antisense Oligo
cacauuugggcucuaucua

SEQ ID NO: 61913 - RNA, 19 nt, Artificial Sequence
  Sense Oligo
uagagcccaaaugugacug

SEQ ID NO: 61914 - RNA, 19 nt, Artificial Sequence
  Antisense Oligo
cagucacauuugggcucua

SEQ ID NO: 61915 - RNA, 19 nt, Artificial Sequence
  Sense Oligo
agagcccaaaugugacuga

SEQ ID NO: 61916 - RNA, 19 nt, Artificial Sequence
  Antisense Oligo
ucagucacauuugggcucu

SEQ ID NO: 61917 - RNA, 19 nt, Artificial Sequence
  Sense Oligo
gagcccaaaugugacugag

SEQ ID NO: 61918 - RNA, 19 nt, Artificial Sequence
  Antisense Oligo
cucagucacauuugggcuc

SEQ ID NO: 61919 - RNA, 19 nt, Artificial Sequence
  Sense Oligo
ugugacugaguacaugagg

SEQ ID NO: 61920 - RNA, 19 nt, Artificial Sequence
  Antisense Oligo
ccucauguacucagucaca

SEQ ID NO: 61921 - RNA, 19 nt, Artificial Sequence
  Sense Oligo
gugacugaguacaugaggc

SEQ ID NO: 61922 - RNA, 19 nt, Artificial Sequence
  Antisense Oligo
gccucauguacucagucac

SEQ ID NO: 61923 - RNA, 19 nt, Artificial Sequence
  Sense Oligo
ugacugaguacaugaggcc

SEQ ID NO: 61924 - RNA, 19 nt, Artificial Sequence
  Antisense Oligo
ggccucauguacucaguca

SEQ ID NO: 61925 - RNA, 19 nt, Artificial Sequence
  Sense Oligo
gacugaguacaugaggccc

SEQ ID NO: 61926 - RNA, 19 nt, Artificial Sequence
  Antisense Oligo
gggccucauguacucaguc

SEQ ID NO: 61927 - RNA, 19 nt, Artificial Sequence
  Sense Oligo
acagcgugaugugagcggg

SEQ ID NO: 61928 - RNA, 19 nt, Artificial Sequence
  Antisense Oligo
cccgcucacaucacgcugu

SEQ ID NO: 61929 - RNA, 19 nt, Artificial Sequence
  Sense Oligo
aacugguagauaggacaga

SEQ ID NO: 61930 - RNA, 19 nt, Artificial Sequence
  Antisense Oligo
ucuguccuaucuaccaguu

SEQ ID NO: 61931 - RNA, 19 nt, Artificial Sequence
  Sense Oligo
acugguagauaggacagag

SEQ ID NO: 61932 - RNA, 19 nt, Artificial Sequence
  Antisense Oligo
cucuguccuaucuaccagu

SEQ ID NO: 61933 - RNA, 19 nt, Artificial Sequence
  Sense Oligo
gcucccuggugcacgacau

SEQ ID NO: 61934 - RNA, 19 nt, Artificial Sequence
  Antisense Oligo
augucgugcaccagggagc

SEQ ID NO: 61935 - RNA, 19 nt, Artificial Sequence
  Sense Oligo
cucccuggugcacgacaug

SEQ ID NO: 61936 - RNA, 19 nt, Artificial Sequence
  Antisense Oligo
caugucgugcaccagggag

SEQ ID NO: 61937 - RNA, 19 nt, Artificial Sequence
  Sense Oligo
ucccuggugcacgacauga

SEQ ID NO: 61938 - RNA, 19 nt, Artificial Sequence
  Antisense Oligo
ucaugucgugcaccaggga

SEQ ID NO: 61939 - RNA, 19 nt, Artificial Sequence
  Sense Oligo
cccuggugcacgacaugag

SEQ ID NO: 61940 - RNA, 19 nt, Artificial Sequence
  Antisense Oligo
cucaugucgugcaccaggg

SEQ ID NO: 61941 - RNA, 19 nt, Artificial Sequence
  Sense Oligo
ccuggugcacgacaugagu

SEQ ID NO: 61942 - RNA, 19 nt, Artificial Sequence
  Antisense Oligo
acucaugucgugcaccagg

SEQ ID NO: 61943 - RNA, 19 nt, Artificial Sequence
  Sense Oligo
cuggugcacgacaugagug

SEQ ID NO: 61944 - RNA, 19 nt, Artificial Sequence
  Antisense Oligo
cacucaugucgugcaccag

SEQ ID NO: 61945 - RNA, 19 nt, Artificial Sequence
  Sense Oligo
uggugcacgacaugagugg

SEQ ID NO: 61946 - RNA, 19 nt, Artificial Sequence
  Antisense Oligo
ccacucaugucgugcacca

SEQ ID NO: 61947 - RNA, 19 nt, Artificial Sequence
  Sense Oligo
ggugcacgacaugaguggg

SEQ ID NO: 61948 - RNA, 19 nt, Artificial Sequence
  Antisense Oligo
cccacucaugucgugcacc

SEQ ID NO: 61949 - RNA, 19 nt, Artificial Sequence
  Sense Oligo
cccacucaggaauucuauu

SEQ ID NO: 61950 - RNA, 19 nt, Artificial Sequence
  Antisense Oligo
aauagaauuccugaguggg

SEQ ID NO: 61951 - RNA, 19 nt, Artificial Sequence
  Sense Oligo
ucuauuccuucugcaggcc

SEQ ID NO: 61952 - RNA, 19 nt, Artificial Sequence
  Antisense Oligo
ggccugcagaaggaauaga

SEQ ID NO: 61953 - RNA, 19 nt, Artificial Sequence
  Sense Oligo
uauuccuucugcaggccuu

SEQ ID NO: 61954 - RNA, 19 nt, Artificial Sequence
  Antisense Oligo
aaggccugcagaaggaaua

SEQ ID NO: 61955 - RNA, 19 nt, Artificial Sequence
  Sense Oligo
uuccuucugcaggccuuaa

SEQ ID NO: 61956 - RNA, 19 nt, Artificial Sequence
  Antisense Oligo
uuaaggccugcagaaggaa

SEQ ID NO: 61957 - RNA, 19 nt, Artificial Sequence
  Sense Oligo
uccuucugcaggccuuaaa

SEQ ID NO: 61958 - RNA, 19 nt, Artificial Sequence
  Antisense Oligo
uuuaaggccugcagaagga

SEQ ID NO: 61959 - RNA, 19 nt, Artificial Sequence
  Sense Oligo
cucuggcaguuccugucug

SEQ ID NO: 61960 - RNA, 19 nt, Artificial Sequence
  Antisense Oligo
cagacaggaacugccagag

SEQ ID NO: 61961 - RNA, 19 nt, Artificial Sequence
  Sense Oligo
caguuccugucugcucaua

SEQ ID NO: 61962 - RNA, 19 nt, Artificial Sequence
  Antisense Oligo
uaugagcagacaggaacug

SEQ ID NO: 61963 - RNA, 19 nt, Artificial Sequence
  Sense Oligo
aguuccugucugcucauaa

SEQ ID NO: 61964 - RNA, 19 nt, Artificial Sequence
  Antisense Oligo
uuaugagcagacaggaacu

SEQ ID NO: 61965 - RNA, 19 nt, Artificial Sequence
  Sense Oligo
guuccugucugcucauaag

SEQ ID NO: 61966 - RNA, 19 nt, Artificial Sequence
  Antisense Oligo
cuuaugagcagacaggaac

SEQ ID NO: 61967 - RNA, 19 nt, Artificial Sequence
  Sense Oligo
uuccugucugcucauaagu

SEQ ID NO: 61968 - RNA, 19 nt, Artificial Sequence
  Antisense Oligo
acuuaugagcagacaggaa

SEQ ID NO: 61969 - RNA, 19 nt, Artificial Sequence
  Sense Oligo
uccugucugcucauaaguc

SEQ ID NO: 61970 - RNA, 19 nt, Artificial Sequence
  Antisense Oligo
gacuuaugagcagacagga

SEQ ID NO: 61971 - RNA, 19 nt, Artificial Sequence
  Sense Oligo
ccugucugcucauaagucu

SEQ ID NO: 61972 - RNA, 19 nt, Artificial Sequence
  Antisense Oligo
agacuuaugagcagacagg

SEQ ID NO: 61973 - RNA, 19 nt, Artificial Sequence
  Sense Oligo
cugucugcucauaagucug

SEQ ID NO: 61974 - RNA, 19 nt, Artificial Sequence
  Antisense Oligo
cagacuuaugagcagacag

SEQ ID NO: 61975 - RNA, 19 nt, Artificial Sequence
  Sense Oligo
ugucugcucauaagucuga

SEQ ID NO: 61976 - RNA, 19 nt, Artificial Sequence
  Antisense Oligo
ucagacuuaugagcagaca

SEQ ID NO: 61977 - RNA, 19 nt, Artificial Sequence
  Sense Oligo
gucugcucauaagucugaa

SEQ ID NO: 61978 - RNA, 19 nt, Artificial Sequence
  Antisense Oligo
uucagacuuaugagcagac

SEQ ID NO: 61979 - RNA, 19 nt, Artificial Sequence
  Sense Oligo
caaaguaagucuggucucu

SEQ ID NO: 61980 - RNA, 19 nt, Artificial Sequence
  Antisense Oligo
agagaccagacuuacuuug

SEQ ID NO: 61981 - RNA, 19 nt, Artificial Sequence
  Sense Oligo
aaaguaagucuggucucuu

SEQ ID NO: 61982 - RNA, 19 nt, Artificial Sequence
  Antisense Oligo
aagagaccagacuuacuuu

SEQ ID NO: 61983 - RNA, 19 nt, Artificial Sequence
  Sense Oligo
aaguaagucuggucucuuc

SEQ ID NO: 61984 - RNA, 19 nt, Artificial Sequence
  Antisense Oligo
gaagagaccagacuuacuu

SEQ ID NO: 61985 - RNA, 19 nt, Artificial Sequence
  Sense Oligo
aagucuggucucuuccucu

SEQ ID NO: 61986 - RNA, 19 nt, Artificial Sequence
  Antisense Oligo
agaggaagagaccagacuu

SEQ ID NO: 61987 - RNA, 19 nt, Artificial Sequence
  Sense Oligo
gucuggucucuuccucucu

SEQ ID NO: 61988 - RNA, 19 nt, Artificial Sequence
  Antisense Oligo
agagaggaagagaccagac

SEQ ID NO: 61989 - RNA, 19 nt, Artificial Sequence
  Sense Oligo
ucuggucucuuccucucug

SEQ ID NO: 61990 - RNA, 19 nt, Artificial Sequence
  Antisense Oligo
cagagaggaagagaccaga

SEQ ID NO: 61991 - RNA, 19 nt, Artificial Sequence
  Sense Oligo
uggacagagggacugcgcu

SEQ ID NO: 61992 - RNA, 19 nt, Artificial Sequence
  Antisense Oligo
agcgcagucccucugucca

SEQ ID NO: 61993 - RNA, 19 nt, Artificial Sequence
  Sense Oligo
acugcgcucccuucucccu

SEQ ID NO: 61994 - RNA, 19 nt, Artificial Sequence
  Antisense Oligo
agggagaagggagcgcagu

SEQ ID NO: 61995 - RNA, 19 nt, Artificial Sequence
  Sense Oligo
cccuucucccugcaggcuu

SEQ ID NO: 61996 - RNA, 19 nt, Artificial Sequence
  Antisense Oligo
aagccugcagggagaaggg

SEQ ID NO: 61997 - RNA, 19 nt, Artificial Sequence
  Sense Oligo
cucccugcaggcuuuaaug

SEQ ID NO: 61998 - RNA, 19 nt, Artificial Sequence
  Antisense Oligo
cauuaaagccugcagggag

SEQ ID NO: 61999 - RNA, 19 nt, Artificial Sequence
  Sense Oligo
ucccugcaggcuuuaaugc

SEQ ID NO: 62000 - RNA, 19 nt, Artificial Sequence
  Antisense Oligo
gcauuaaagccugcaggga

SEQ ID NO: 62001 - RNA, 19 nt, Artificial Sequence
  Sense Oligo
cccugcaggcuuuaaugcu

SEQ ID NO: 62002 - RNA, 19 nt, Artificial Sequence
  Antisense Oligo
agcauuaaagccugcaggg

SEQ ID NO: 62003 - RNA, 19 nt, Artificial Sequence
  Sense Oligo
ccugcaggcuuuaaugcuu

SEQ ID NO: 62004 - RNA, 19 nt, Artificial Sequence
  Antisense Oligo
aagcauuaaagccugcagg

SEQ ID NO: 62005 - RNA, 19 nt, Artificial Sequence
  Sense Oligo
cugcaggcuuuaaugcuuc

SEQ ID NO: 62006 - RNA, 19 nt, Artificial Sequence
  Antisense Oligo
gaagcauuaaagccugcag

SEQ ID NO: 62007 - RNA, 19 nt, Artificial Sequence
  Sense Oligo
cuucauuugcucuuccguc

SEQ ID NO: 62008 - RNA, 19 nt, Artificial Sequence
  Antisense Oligo
gacggaagagcaaaugaag

SEQ ID NO: 62009 - RNA, 19 nt, Artificial Sequence
  Sense Oligo
ucauuugcucuuccgucgu

SEQ ID NO: 62010 - RNA, 19 nt, Artificial Sequence
  Antisense Oligo
acgacggaagagcaaauga

SEQ ID NO: 62011 - RNA, 19 nt, Artificial Sequence
  Sense Oligo
cauuugcucuuccgucguu

SEQ ID NO: 62012 - RNA, 19 nt, Artificial Sequence
  Antisense Oligo
aacgacggaagagcaaaug

SEQ ID NO: 62013 - RNA, 19 nt, Artificial Sequence
  Sense Oligo
auuugcucuuccgucguuu

SEQ ID NO: 62014 - RNA, 19 nt, Artificial Sequence
  Antisense Oligo
aaacgacggaagagcaaau

SEQ ID NO: 62015 - RNA, 19 nt, Artificial Sequence
  Sense Oligo
uuugcucuuccgucguuuu

SEQ ID NO: 62016 - RNA, 19 nt, Artificial Sequence
  Antisense Oligo
aaaacgacggaagagcaaa

SEQ ID NO: 62017 - RNA, 19 nt, Artificial Sequence
  Sense Oligo
uugcucuuccgucguuuua

SEQ ID NO: 62018 - RNA, 19 nt, Artificial Sequence
  Antisense Oligo
uaaaacgacggaagagcaa

SEQ ID NO: 62019 - RNA, 19 nt, Artificial Sequence
  Sense Oligo
ugcucuuccgucguuuuag

SEQ ID NO: 62020 - RNA, 19 nt, Artificial Sequence
  Antisense Oligo
cuaaaacgacggaagagca

SEQ ID NO: 62021 - RNA, 19 nt, Artificial Sequence
  Sense Oligo
gcucuuccgucguuuuagg

SEQ ID NO: 62022 - RNA, 19 nt, Artificial Sequence
  Antisense Oligo
ccuaaaacgacggaagagc

SEQ ID NO: 62023 - RNA, 19 nt, Artificial Sequence
  Sense Oligo
cucuuccgucguuuuagga

SEQ ID NO: 62024 - RNA, 19 nt, Artificial Sequence
  Antisense Oligo
uccuaaaacgacggaagag

SEQ ID NO: 62025 - RNA, 19 nt, Artificial Sequence
  Sense Oligo
ucuuccgucguuuuaggag

SEQ ID NO: 62026 - RNA, 19 nt, Artificial Sequence
  Antisense Oligo
cuccuaaaacgacggaaga

SEQ ID NO: 62027 - RNA, 19 nt, Artificial Sequence
  Sense Oligo
cuuccgucguuuuaggagc

SEQ ID NO: 62028 - RNA, 19 nt, Artificial Sequence
  Antisense Oligo
gcuccuaaaacgacggaag

SEQ ID NO: 62029 - RNA, 19 nt, Artificial Sequence
  Sense Oligo
uuccgucguuuuaggagcc

SEQ ID NO: 62030 - RNA, 19 nt, Artificial Sequence
  Antisense Oligo
ggcuccuaaaacgacggaa

SEQ ID NO: 62031 - RNA, 19 nt, Artificial Sequence
  Sense Oligo
uccgucguuuuaggagcca

SEQ ID NO: 62032 - RNA, 19 nt, Artificial Sequence
  Antisense Oligo
uggcuccuaaaacgacgga

SEQ ID NO: 62033 - RNA, 19 nt, Artificial Sequence
  Sense Oligo
ucguuuuaggagccauuug

SEQ ID NO: 62034 - RNA, 19 nt, Artificial Sequence
  Antisense Oligo
caaauggcuccuaaaacga

SEQ ID NO: 62035 - RNA, 19 nt, Artificial Sequence
  Sense Oligo
cguuuuaggagccauuugg

SEQ ID NO: 62036 - RNA, 19 nt, Artificial Sequence
  Antisense Oligo
ccaaauggcuccuaaaacg

SEQ ID NO: 62037 - RNA, 19 nt, Artificial Sequence
  Sense Oligo
guuuuaggagccauuuggg

SEQ ID NO: 62038 - RNA, 19 nt, Artificial Sequence
  Antisense Oligo
cccaaauggcuccuaaaac

SEQ ID NO: 62039 - RNA, 19 nt, Artificial Sequence
  Sense Oligo
cuccucagcacauuccuaa

SEQ ID NO: 62040 - RNA, 19 nt, Artificial Sequence
  Antisense Oligo
uuaggaaugugcugaggag

SEQ ID NO: 62041 - RNA, 19 nt, Artificial Sequence
  Sense Oligo
uccucagcacauuccuaaa

SEQ ID NO: 62042 - RNA, 19 nt, Artificial Sequence
  Antisense Oligo
uuuaggaaugugcugagga

SEQ ID NO: 62043 - RNA, 19 nt, Artificial Sequence
  Sense Oligo
cucagcacauuccuaaauc

SEQ ID NO: 62044 - RNA, 19 nt, Artificial Sequence
  Antisense Oligo
gauuuaggaaugugcugag

SEQ ID NO: 62045 - RNA, 19 nt, Artificial Sequence
  Sense Oligo
ucagcacauuccuaaauca

SEQ ID NO: 62046 - RNA, 19 nt, Artificial Sequence
  Antisense Oligo
ugauuuaggaaugugcuga

SEQ ID NO: 62047 - RNA, 19 nt, Artificial Sequence
  Sense Oligo
cacauuccuaaaucagacu

SEQ ID NO: 62048 - RNA, 19 nt, Artificial Sequence
  Antisense Oligo
agucugauuuaggaaugug

SEQ ID NO: 62049 - RNA, 19 nt, Artificial Sequence
  Sense Oligo
uuccuaaaucagacuggcc

SEQ ID NO: 62050 - RNA, 19 nt, Artificial Sequence
  Antisense Oligo
ggccagucugauuuaggaa

SEQ ID NO: 62051 - RNA, 19 nt, Artificial Sequence
  Sense Oligo
uccuaaaucagacuggccu

SEQ ID NO: 62052 - RNA, 19 nt, Artificial Sequence
  Antisense Oligo
aggccagucugauuuagga

SEQ ID NO: 62053 - RNA, 19 nt, Artificial Sequence
  Sense Oligo
ccuaaaucagacuggccua

SEQ ID NO: 62054 - RNA, 19 nt, Artificial Sequence
  Antisense Oligo
uaggccagucugauuuagg

SEQ ID NO: 62055 - RNA, 19 nt, Artificial Sequence
  Sense Oligo
cuaaaucagacuggccuag

SEQ ID NO: 62056 - RNA, 19 nt, Artificial Sequence
  Antisense Oligo
cuaggccagucugauuuag

SEQ ID NO: 62057 - RNA, 19 nt, Artificial Sequence
  Sense Oligo
uaaaucagacuggccuaga

SEQ ID NO: 62058 - RNA, 19 nt, Artificial Sequence
  Antisense Oligo
ucuaggccagucugauuua

SEQ ID NO: 62059 - RNA, 19 nt, Artificial Sequence
  Sense Oligo
aaaucagacuggccuagac

SEQ ID NO: 62060 - RNA, 19 nt, Artificial Sequence
  Antisense Oligo
gucuaggccagucugauuu

SEQ ID NO: 62061 - RNA, 19 nt, Artificial Sequence
  Sense Oligo
aaucagacuggccuagacg

SEQ ID NO: 62062 - RNA, 19 nt, Artificial Sequence
  Antisense Oligo
cgucuaggccagucugauu

SEQ ID NO: 62063 - RNA, 19 nt, Artificial Sequence
  Sense Oligo
aucagacuggccuagacgc

SEQ ID NO: 62064 - RNA, 19 nt, Artificial Sequence
  Antisense Oligo
gcgucuaggccagucugau

SEQ ID NO: 62065 - RNA, 19 nt, Artificial Sequence
  Sense Oligo
ucagacuggccuagacgcc

SEQ ID NO: 62066 - RNA, 19 nt, Artificial Sequence
  Antisense Oligo
ggcgucuaggccagucuga

SEQ ID NO: 62067 - RNA, 19 nt, Artificial Sequence
  Sense Oligo
cagacuggccuagacgccu

SEQ ID NO: 62068 - RNA, 19 nt, Artificial Sequence
  Antisense Oligo
aggcgucuaggccagucug

SEQ ID NO: 62069 - RNA, 19 nt, Artificial Sequence
  Sense Oligo
agacuggccuagacgccuu

SEQ ID NO: 62070 - RNA, 19 nt, Artificial Sequence
  Antisense Oligo
aaggcgucuaggccagucu

SEQ ID NO: 62071 - RNA, 19 nt, Artificial Sequence
  Sense Oligo
gacuggccuagacgccuuc

SEQ ID NO: 62072 - RNA, 19 nt, Artificial Sequence
  Antisense Oligo
gaaggcgucuaggccaguc

SEQ ID NO: 62073 - RNA, 19 nt, Artificial Sequence
  Sense Oligo
acuggccuagacgccuucc

SEQ ID NO: 62074 - RNA, 19 nt, Artificial Sequence
  Antisense Oligo
ggaaggcgucuaggccagu

SEQ ID NO: 62075 - RNA, 19 nt, Artificial Sequence
  Sense Oligo
cuggccuagacgccuuccu

SEQ ID NO: 62076 - RNA, 19 nt, Artificial Sequence
  Antisense Oligo
aggaaggcgucuaggccag

SEQ ID NO: 62077 - RNA, 19 nt, Artificial Sequence
  Sense Oligo
ccuagacgccuuccugcua

SEQ ID NO: 62078 - RNA, 19 nt, Artificial Sequence
  Antisense Oligo
uagcaggaaggcgucuagg

SEQ ID NO: 62079 - RNA, 19 nt, Artificial Sequence
  Sense Oligo
acgccuuccugcuagagcu

SEQ ID NO: 62080 - RNA, 19 nt, Artificial Sequence
  Antisense Oligo
agcucuagcaggaaggcgu

SEQ ID NO: 62081 - RNA, 19 nt, Artificial Sequence
  Sense Oligo
cgccuuccugcuagagcug

SEQ ID NO: 62082 - RNA, 19 nt, Artificial Sequence
  Antisense Oligo
cagcucuagcaggaaggcg

SEQ ID NO: 62083 - RNA, 19 nt, Artificial Sequence
  Sense Oligo
gccuuccugcuagagcugc

SEQ ID NO: 62084 - RNA, 19 nt, Artificial Sequence
  Antisense Oligo
gcagcucuagcaggaaggc

SEQ ID NO: 62085 - RNA, 19 nt, Artificial Sequence
  Sense Oligo
ccuuccugcuagagcugca

SEQ ID NO: 62086 - RNA, 19 nt, Artificial Sequence
  Antisense Oligo
ugcagcucuagcaggaagg

SEQ ID NO: 62087 - RNA, 19 nt, Artificial Sequence
  Sense Oligo
ccugcuagagcugcacgaa

SEQ ID NO: 62088 - RNA, 19 nt, Artificial Sequence
  Antisense Oligo
uucgugcagcucuagcagg

SEQ ID NO: 62089 - RNA, 19 nt, Artificial Sequence
  Sense Oligo
cucaguggagguauggauu

SEQ ID NO: 62090 - RNA, 19 nt, Artificial Sequence
  Antisense Oligo
aauccauaccuccacugag

SEQ ID NO: 62091 - RNA, 19 nt, Artificial Sequence
  Sense Oligo
ucaguggagguauggauuu

SEQ ID NO: 62092 - RNA, 19 nt, Artificial Sequence
  Antisense Oligo
aaauccauaccuccacuga

SEQ ID NO: 62093 - RNA, 19 nt, Artificial Sequence
  Sense Oligo
caguggagguauggauuug

SEQ ID NO: 62094 - RNA, 19 nt, Artificial Sequence
  Antisense Oligo
caaauccauaccuccacug

SEQ ID NO: 62095 - RNA, 19 nt, Artificial Sequence
  Sense Oligo
aguggagguauggauuugc

SEQ ID NO: 62096 - RNA, 19 nt, Artificial Sequence
  Antisense Oligo
gcaaauccauaccuccacu

SEQ ID NO: 62097 - RNA, 19 nt, Artificial Sequence
  Sense Oligo
guggagguauggauuugca

SEQ ID NO: 62098 - RNA, 19 nt, Artificial Sequence
  Antisense Oligo
ugcaaauccauaccuccac

SEQ ID NO: 62099 - RNA, 19 nt, Artificial Sequence
  Sense Oligo
uauggauuugcacaccuau

SEQ ID NO: 62100 - RNA, 19 nt, Artificial Sequence
  Antisense Oligo
auaggugugcaaauccaua

SEQ ID NO: 62101 - RNA, 19 nt, Artificial Sequence
  Sense Oligo
caauguugugcugucucuc

SEQ ID NO: 62102 - RNA, 19 nt, Artificial Sequence
  Antisense Oligo
gagagacagcacaacauug

SEQ ID NO: 62103 - RNA, 19 nt, Artificial Sequence
  Sense Oligo
auaguucuuuucuuaccac

SEQ ID NO: 62104 - RNA, 19 nt, Artificial Sequence
  Antisense Oligo
gugguaagaaaagaacuau

SEQ ID NO: 62105 - RNA, 19 nt, Artificial Sequence
  Sense Oligo
uaguucuuuucuuaccaca

SEQ ID NO: 62106 - RNA, 19 nt, Artificial Sequence
  Antisense Oligo
ugugguaagaaaagaacua

SEQ ID NO: 62107 - RNA, 19 nt, Artificial Sequence
  Sense Oligo
uuaccacagaaucccauuu

SEQ ID NO: 62108 - RNA, 19 nt, Artificial Sequence
  Antisense Oligo
aaaugggauucugugguaa

SEQ ID NO: 62109 - RNA, 19 nt, Artificial Sequence
  Sense Oligo
aaucccauuuccugcuuuu

SEQ ID NO: 62110 - RNA, 19 nt, Artificial Sequence
  Antisense Oligo
aaaagcaggaaaugggauu

SEQ ID NO: 62111 - RNA, 19 nt, Artificial Sequence
  Sense Oligo
ugucauuaccagggcaccu

SEQ ID NO: 62112 - RNA, 19 nt, Artificial Sequence
  Antisense Oligo
aggugcccugguaaugaca

SEQ ID NO: 62113 - RNA, 19 nt, Artificial Sequence
  Sense Oligo
ggcaccugaggacuggcuu

SEQ ID NO: 62114 - RNA, 19 nt, Artificial Sequence
  Antisense Oligo
aagccaguccucaggugcc

SEQ ID NO: 62115 - RNA, 19 nt, Artificial Sequence
  Sense Oligo
gcaccugaggacuggcuuu

SEQ ID NO: 62116 - RNA, 19 nt, Artificial Sequence
  Antisense Oligo
aaagccaguccucaggugc

SEQ ID NO: 62117 - RNA, 19 nt, Artificial Sequence
  Sense Oligo
caccugaggacuggcuuuu

SEQ ID NO: 62118 - RNA, 19 nt, Artificial Sequence
  Antisense Oligo
aaaagccaguccucaggug

SEQ ID NO: 62119 - RNA, 19 nt, Artificial Sequence
  Sense Oligo
guuuuaaucucuacugggu

SEQ ID NO: 62120 - RNA, 19 nt, Artificial Sequence
  Antisense Oligo
acccaguagagauuaaaac

SEQ ID NO: 62121 - RNA, 19 nt, Artificial Sequence
  Sense Oligo
uuuaaucucuacuggguuu

SEQ ID NO: 62122 - RNA, 19 nt, Artificial Sequence
  Antisense Oligo
aaacccaguagagauuaaa

SEQ ID NO: 62123 - RNA, 19 nt, Artificial Sequence
  Sense Oligo
uacuggguuuucuuuaagc

SEQ ID NO: 62124 - RNA, 19 nt, Artificial Sequence
  Antisense Oligo
gcuuaaagaaaacccagua

SEQ ID NO: 62125 - RNA, 19 nt, Artificial Sequence
  Sense Oligo
acuggguuuucuuuaagca

SEQ ID NO: 62126 - RNA, 19 nt, Artificial Sequence
  Antisense Oligo
ugcuuaaagaaaacccagu

SEQ ID NO: 62127 - RNA, 19 nt, Artificial Sequence
  Sense Oligo
uuacccaggcuggagugca

SEQ ID NO: 62128 - RNA, 19 nt, Artificial Sequence
  Antisense Oligo
ugcacuccagccuggguaa

SEQ ID NO: 62129 - RNA, 19 nt, Artificial Sequence
  Sense Oligo
aggcuggagugcaguggag

SEQ ID NO: 62130 - RNA, 19 nt, Artificial Sequence
  Antisense Oligo
cuccacugcacuccagccu

SEQ ID NO: 62131 - RNA, 19 nt, Artificial Sequence
  Sense Oligo
gcaaccuuggcucacugca

SEQ ID NO: 62132 - RNA, 19 nt, Artificial Sequence
  Antisense Oligo
ugcagugagccaagguugc

SEQ ID NO: 62133 - RNA, 19 nt, Artificial Sequence
  Sense Oligo
caaccuuggcucacugcaa

SEQ ID NO: 62134 - RNA, 19 nt, Artificial Sequence
  Antisense Oligo
uugcagugagccaagguug

SEQ ID NO: 62135 - RNA, 19 nt, Artificial Sequence
  Sense Oligo
aaccuuggcucacugcaac

SEQ ID NO: 62136 - RNA, 19 nt, Artificial Sequence
  Antisense Oligo
guugcagugagccaagguu

SEQ ID NO: 62137 - RNA, 19 nt, Artificial Sequence
  Sense Oligo
accuuggcucacugcaacc

SEQ ID NO: 62138 - RNA, 19 nt, Artificial Sequence
  Antisense Oligo
gguugcagugagccaaggu

SEQ ID NO: 62139 - RNA, 19 nt, Artificial Sequence
  Sense Oligo
ccuuggcucacugcaaccu

SEQ ID NO: 62140 - RNA, 19 nt, Artificial Sequence
  Antisense Oligo
agguugcagugagccaagg

SEQ ID NO: 62141 - RNA, 19 nt, Artificial Sequence
  Sense Oligo
cucugccucccagguucaa

SEQ ID NO: 62142 - RNA, 19 nt, Artificial Sequence
  Antisense Oligo
uugaaccugggaggcagag

SEQ ID NO: 62143 - RNA, 19 nt, Artificial Sequence
  Sense Oligo
ucugccucccagguucaag

SEQ ID NO: 62144 - RNA, 19 nt, Artificial Sequence
  Antisense Oligo
cuugaaccugggaggcaga

SEQ ID NO: 62145 - RNA, 19 nt, Artificial Sequence
  Sense Oligo
ucucaugccucagcuuccc

SEQ ID NO: 62146 - RNA, 19 nt, Artificial Sequence
  Antisense Oligo
gggaagcugaggcaugaga

SEQ ID NO: 62147 - RNA, 19 nt, Artificial Sequence
  Sense Oligo
cucaugccucagcuuccca

SEQ ID NO: 62148 - RNA, 19 nt, Artificial Sequence
  Antisense Oligo
ugggaagcugaggcaugag

SEQ ID NO: 62149 - RNA, 19 nt, Artificial Sequence
  Sense Oligo
ucaugccucagcuucccaa

SEQ ID NO: 62150 - RNA, 19 nt, Artificial Sequence
  Antisense Oligo
uugggaagcugaggcauga

SEQ ID NO: 62151 - RNA, 19 nt, Artificial Sequence
  Sense Oligo
caugccucagcuucccaaa

SEQ ID NO: 62152 - RNA, 19 nt, Artificial Sequence
  Antisense Oligo
uuugggaagcugaggcaug

SEQ ID NO: 62153 - RNA, 19 nt, Artificial Sequence
  Sense Oligo
augccucagcuucccaaau

SEQ ID NO: 62154 - RNA, 19 nt, Artificial Sequence
  Antisense Oligo
auuugggaagcugaggcau

SEQ ID NO: 62155 - RNA, 19 nt, Artificial Sequence
  Sense Oligo
ugccucagcuucccaaaua

SEQ ID NO: 62156 - RNA, 19 nt, Artificial Sequence
  Antisense Oligo
uauuugggaagcugaggca

SEQ ID NO: 62157 - RNA, 19 nt, Artificial Sequence
  Sense Oligo
ccaaauagcugggacuaca

SEQ ID NO: 62158 - RNA, 19 nt, Artificial Sequence
  Antisense Oligo
uguagucccagcuauuugg

SEQ ID NO: 62159 - RNA, 19 nt, Artificial Sequence
  Sense Oligo
caaauagcugggacuacag

SEQ ID NO: 62160 - RNA, 19 nt, Artificial Sequence
  Antisense Oligo
cuguagucccagcuauuug

SEQ ID NO: 62161 - RNA, 19 nt, Artificial Sequence
  Sense Oligo
uagcugggacuacaggcgu

SEQ ID NO: 62162 - RNA, 19 nt, Artificial Sequence
  Antisense Oligo
acgccuguagucccagcua

SEQ ID NO: 62163 - RNA, 19 nt, Artificial Sequence
  Sense Oligo
agcugggacuacaggcgug

SEQ ID NO: 62164 - RNA, 19 nt, Artificial Sequence
  Antisense Oligo
cacgccuguagucccagcu

SEQ ID NO: 62165 - RNA, 19 nt, Artificial Sequence
  Sense Oligo
gcugggacuacaggcgugu

SEQ ID NO: 62166 - RNA, 19 nt, Artificial Sequence
  Antisense Oligo
acacgccuguagucccagc

SEQ ID NO: 62167 - RNA, 19 nt, Artificial Sequence
  Sense Oligo
cguguaccaccaugccugg

SEQ ID NO: 62168 - RNA, 19 nt, Artificial Sequence
  Antisense Oligo
ccaggcauggugguacacg

SEQ ID NO: 62169 - RNA, 19 nt, Artificial Sequence
  Sense Oligo
guguaccaccaugccuggc

SEQ ID NO: 62170 - RNA, 19 nt, Artificial Sequence
  Antisense Oligo
gccaggcauggugguacac

SEQ ID NO: 62171 - RNA, 19 nt, Artificial Sequence
  Sense Oligo
uguaccaccaugccuggcu

SEQ ID NO: 62172 - RNA, 19 nt, Artificial Sequence
  Antisense Oligo
agccaggcauggugguaca

SEQ ID NO: 62173 - RNA, 19 nt, Artificial Sequence
  Sense Oligo
guaccaccaugccuggcua

SEQ ID NO: 62174 - RNA, 19 nt, Artificial Sequence
  Antisense Oligo
uagccaggcauggugguac

SEQ ID NO: 62175 - RNA, 19 nt, Artificial Sequence
  Sense Oligo
uaccaccaugccuggcuaa

SEQ ID NO: 62176 - RNA, 19 nt, Artificial Sequence
  Antisense Oligo
uuagccaggcaugguggua

SEQ ID NO: 62177 - RNA, 19 nt, Artificial Sequence
  Sense Oligo
accaccaugccuggcuaau

SEQ ID NO: 62178 - RNA, 19 nt, Artificial Sequence
  Antisense Oligo
auuagccaggcaugguggu

SEQ ID NO: 62179 - RNA, 19 nt, Artificial Sequence
  Sense Oligo
ccaccaugccuggcuaauu

SEQ ID NO: 62180 - RNA, 19 nt, Artificial Sequence
  Antisense Oligo
aauuagccaggcauggugg

SEQ ID NO: 62181 - RNA, 19 nt, Artificial Sequence
  Sense Oligo
caccaugccuggcuaauuu

SEQ ID NO: 62182 - RNA, 19 nt, Artificial Sequence
  Antisense Oligo
aaauuagccaggcauggug

SEQ ID NO: 62183 - RNA, 19 nt, Artificial Sequence
  Sense Oligo
accaugccuggcuaauuuu

SEQ ID NO: 62184 - RNA, 19 nt, Artificial Sequence
  Antisense Oligo
aaaauuagccaggcauggu

SEQ ID NO: 62185 - RNA, 19 nt, Artificial Sequence
  Sense Oligo
uuggccucucaaagugcua

SEQ ID NO: 62186 - RNA, 19 nt, Artificial Sequence
  Antisense Oligo
uagcacuuugagaggccaa

SEQ ID NO: 62187 - RNA, 19 nt, Artificial Sequence
  Sense Oligo
uggccucucaaagugcuag

SEQ ID NO: 62188 - RNA, 19 nt, Artificial Sequence
  Antisense Oligo
cuagcacuuugagaggcca

SEQ ID NO: 62189 - RNA, 19 nt, Artificial Sequence
  Sense Oligo
cucucaaagugcuagaaug

SEQ ID NO: 62190 - RNA, 19 nt, Artificial Sequence
  Antisense Oligo
cauucuagcacuuugagag

SEQ ID NO: 62191 - RNA, 19 nt, Artificial Sequence
  Sense Oligo
aggcgugagccacuacacc

SEQ ID NO: 62192 - RNA, 19 nt, Artificial Sequence
  Antisense Oligo
gguguaguggcucacgccu

SEQ ID NO: 62193 - RNA, 19 nt, Artificial Sequence
  Sense Oligo
uacacccagccuaaaaguc

SEQ ID NO: 62194 - RNA, 19 nt, Artificial Sequence
  Antisense Oligo
gacuuuuaggcugggugua

SEQ ID NO: 62195 - RNA, 19 nt, Artificial Sequence
  Sense Oligo
ccagccuaaaagucauaua

SEQ ID NO: 62196 - RNA, 19 nt, Artificial Sequence
  Antisense Oligo
uauaugacuuuuaggcugg

SEQ ID NO: 62197 - RNA, 19 nt, Artificial Sequence
  Sense Oligo
cagccuaaaagucauauau

SEQ ID NO: 62198 - RNA, 19 nt, Artificial Sequence
  Antisense Oligo
auauaugacuuuuaggcug

SEQ ID NO: 62199 - RNA, 19 nt, Artificial Sequence
  Sense Oligo
gccuaaaagucauauauuc

SEQ ID NO: 62200 - RNA, 19 nt, Artificial Sequence
  Antisense Oligo
gaauauaugacuuuuaggc

SEQ ID NO: 62201 - RNA, 19 nt, Artificial Sequence
  Sense Oligo
cagcacuuugggaggccga

SEQ ID NO: 62202 - RNA, 19 nt, Artificial Sequence
  Antisense Oligo
ucggccucccaaagugcug

SEQ ID NO: 62203 - RNA, 19 nt, Artificial Sequence
  Sense Oligo
ugaggucaggaguucaaga

SEQ ID NO: 62204 - RNA, 19 nt, Artificial Sequence
  Antisense Oligo
ucuugaacuccugaccuca

SEQ ID NO: 62205 - RNA, 19 nt, Artificial Sequence
  Sense Oligo
guucaagaccagccuggcc

SEQ ID NO: 62206 - RNA, 19 nt, Artificial Sequence
  Antisense Oligo
ggccaggcuggucuugaac

SEQ ID NO: 62207 - RNA, 19 nt, Artificial Sequence
  Sense Oligo
uucaagaccagccuggcca

SEQ ID NO: 62208 - RNA, 19 nt, Artificial Sequence
  Antisense Oligo
uggccaggcuggucuugaa

SEQ ID NO: 62209 - RNA, 19 nt, Artificial Sequence
  Sense Oligo
ucaagaccagccuggccaa

SEQ ID NO: 62210 - RNA, 19 nt, Artificial Sequence
  Antisense Oligo
uuggccaggcuggucuuga

SEQ ID NO: 62211 - RNA, 19 nt, Artificial Sequence
  Sense Oligo
caagaccagccuggccaac

SEQ ID NO: 62212 - RNA, 19 nt, Artificial Sequence
  Antisense Oligo
guuggccaggcuggucuug

SEQ ID NO: 62213 - RNA, 19 nt, Artificial Sequence
  Sense Oligo
aagaccagccuggccaacu

SEQ ID NO: 62214 - RNA, 19 nt, Artificial Sequence
  Antisense Oligo
aguuggccaggcuggucuu

SEQ ID NO: 62215 - RNA, 19 nt, Artificial Sequence
  Sense Oligo
agaccagccuggccaacug

SEQ ID NO: 62216 - RNA, 19 nt, Artificial Sequence
  Antisense Oligo
caguuggccaggcuggucu

SEQ ID NO: 62217 - RNA, 19 nt, Artificial Sequence
  Sense Oligo
cccaccuacucaggaggcu

SEQ ID NO: 62218 - RNA, 19 nt, Artificial Sequence
  Antisense Oligo
agccuccugaguagguggg

SEQ ID NO: 62219 - RNA, 19 nt, Artificial Sequence
  Sense Oligo
ccaccuacucaggaggcug

SEQ ID NO: 62220 - RNA, 19 nt, Artificial Sequence
  Antisense Oligo
cagccuccugaguaggugg

SEQ ID NO: 62221 - RNA, 19 nt, Artificial Sequence
  Sense Oligo
ugcacuccagccugggcaa

SEQ ID NO: 62222 - RNA, 19 nt, Artificial Sequence
  Antisense Oligo
uugcccaggcuggagugca

SEQ ID NO: 62223 - RNA, 19 nt, Artificial Sequence
  Sense Oligo
ccaauguauaaagagugua

SEQ ID NO: 62224 - RNA, 19 nt, Artificial Sequence
  Antisense Oligo
uacacucuuuauacauugg

SEQ ID NO: 62225 - RNA, 19 nt, Artificial Sequence
  Sense Oligo
uguauaaagaguguaugag

SEQ ID NO: 62226 - RNA, 19 nt, Artificial Sequence
  Antisense Oligo
cucauacacucuuuauaca

SEQ ID NO: 62227 - RNA, 19 nt, Artificial Sequence
  Sense Oligo
uccaucuuuuacauaguug

SEQ ID NO: 62228 - RNA, 19 nt, Artificial Sequence
  Antisense Oligo
caacuauguaaaagaugga

SEQ ID NO: 62229 - RNA, 19 nt, Artificial Sequence
  Sense Oligo
ccaucuuuuacauaguugc

SEQ ID NO: 62230 - RNA, 19 nt, Artificial Sequence
  Antisense Oligo
gcaacuauguaaaagaugg

SEQ ID NO: 62231 - RNA, 19 nt, Artificial Sequence
  Sense Oligo
caucuuuuacauaguugcc

SEQ ID NO: 62232 - RNA, 19 nt, Artificial Sequence
  Antisense Oligo
ggcaacuauguaaaagaug

SEQ ID NO: 62233 - RNA, 19 nt, Artificial Sequence
  Sense Oligo
aucuuuuacauaguugcca

SEQ ID NO: 62234 - RNA, 19 nt, Artificial Sequence
  Antisense Oligo
uggcaacuauguaaaagau

SEQ ID NO: 62235 - RNA, 19 nt, Artificial Sequence
  Sense Oligo
uuacauaguugccaaucua

SEQ ID NO: 62236 - RNA, 19 nt, Artificial Sequence
  Antisense Oligo
uagauuggcaacuauguaa

SEQ ID NO: 62237 - RNA, 19 nt, Artificial Sequence
  Sense Oligo
uacauaguugccaaucuaa

SEQ ID NO: 62238 - RNA, 19 nt, Artificial Sequence
  Antisense Oligo
uuagauuggcaacuaugua

SEQ ID NO: 62239 - RNA, 19 nt, Artificial Sequence
  Sense Oligo
acauaguugccaaucuaaa

SEQ ID NO: 62240 - RNA, 19 nt, Artificial Sequence
  Antisense Oligo
uuuagauuggcaacuaugu

SEQ ID NO: 62241 - RNA, 19 nt, Artificial Sequence
  Sense Oligo
cauaguugccaaucuaaag

SEQ ID NO: 62242 - RNA, 19 nt, Artificial Sequence
  Antisense Oligo
cuuuagauuggcaacuaug

SEQ ID NO: 62243 - RNA, 19 nt, Artificial Sequence
  Sense Oligo
auaguugccaaucuaaagg

SEQ ID NO: 62244 - RNA, 19 nt, Artificial Sequence
  Antisense Oligo
ccuuuagauuggcaacuau

SEQ ID NO: 62245 - RNA, 19 nt, Artificial Sequence
  Sense Oligo
uaguugccaaucuaaaggc

SEQ ID NO: 62246 - RNA, 19 nt, Artificial Sequence
  Antisense Oligo
gccuuuagauuggcaacua

SEQ ID NO: 62247 - RNA, 19 nt, Artificial Sequence
  Sense Oligo
aguugccaaucuaaaggcc

SEQ ID NO: 62248 - RNA, 19 nt, Artificial Sequence
  Antisense Oligo
ggccuuuagauuggcaacu

SEQ ID NO: 62249 - RNA, 19 nt, Artificial Sequence
  Sense Oligo
guugccaaucuaaaggcca

SEQ ID NO: 62250 - RNA, 19 nt, Artificial Sequence
  Antisense Oligo
uggccuuuagauuggcaac

SEQ ID NO: 62251 - RNA, 19 nt, Artificial Sequence
  Sense Oligo
uugccaaucuaaaggccaa

SEQ ID NO: 62252 - RNA, 19 nt, Artificial Sequence
  Antisense Oligo
uuggccuuuagauuggcaa

SEQ ID NO: 62253 - RNA, 19 nt, Artificial Sequence
  Sense Oligo
ugccaaucuaaaggccaaa

SEQ ID NO: 62254 - RNA, 19 nt, Artificial Sequence
  Antisense Oligo
uuuggccuuuagauuggca

SEQ ID NO: 62255 - RNA, 19 nt, Artificial Sequence
  Sense Oligo
gccaaucuaaaggccaaaa

SEQ ID NO: 62256 - RNA, 19 nt, Artificial Sequence
  Antisense Oligo
uuuuggccuuuagauuggc

SEQ ID NO: 62257 - RNA, 19 nt, Artificial Sequence
  Sense Oligo
ccaaucuaaaggccaaaau

SEQ ID NO: 62258 - RNA, 19 nt, Artificial Sequence
  Antisense Oligo
auuuuggccuuuagauugg

SEQ ID NO: 62259 - RNA, 19 nt, Artificial Sequence
  Sense Oligo
caaucuaaaggccaaaaug

SEQ ID NO: 62260 - RNA, 19 nt, Artificial Sequence
  Antisense Oligo
cauuuuggccuuuagauug

SEQ ID NO: 62261 - RNA, 19 nt, Artificial Sequence
  Sense Oligo
aaucuaaaggccaaaaugg

SEQ ID NO: 62262 - RNA, 19 nt, Artificial Sequence
  Antisense Oligo
ccauuuuggccuuuagauu

SEQ ID NO: 62263 - RNA, 19 nt, Artificial Sequence
  Sense Oligo
cuaaaggccaaaaugguau

SEQ ID NO: 62264 - RNA, 19 nt, Artificial Sequence
  Antisense Oligo
auaccauuuuggccuuuag

SEQ ID NO: 62265 - RNA, 19 nt, Artificial Sequence
  Sense Oligo
uaaaggccaaaaugguauc

SEQ ID NO: 62266 - RNA, 19 nt, Artificial Sequence
  Antisense Oligo
gauaccauuuuggccuuua

SEQ ID NO: 62267 - RNA, 19 nt, Artificial Sequence
  Sense Oligo
aaaggccaaaaugguaucu

SEQ ID NO: 62268 - RNA, 19 nt, Artificial Sequence
  Antisense Oligo
agauaccauuuuggccuuu

SEQ ID NO: 62269 - RNA, 19 nt, Artificial Sequence
  Sense Oligo
aaggccaaaaugguaucuc

SEQ ID NO: 62270 - RNA, 19 nt, Artificial Sequence
  Antisense Oligo
gagauaccauuuuggccuu

SEQ ID NO: 62271 - RNA, 19 nt, Artificial Sequence
  Sense Oligo
aggccaaaaugguaucuca

SEQ ID NO: 62272 - RNA, 19 nt, Artificial Sequence
  Antisense Oligo
ugagauaccauuuuggccu

SEQ ID NO: 62273 - RNA, 19 nt, Artificial Sequence
  Sense Oligo
ggccaaaaugguaucucau

SEQ ID NO: 62274 - RNA, 19 nt, Artificial Sequence
  Antisense Oligo
augagauaccauuuuggcc

SEQ ID NO: 62275 - RNA, 19 nt, Artificial Sequence
  Sense Oligo
augguaucucauuuucagu

SEQ ID NO: 62276 - RNA, 19 nt, Artificial Sequence
  Antisense Oligo
acugaaaaugagauaccau

SEQ ID NO: 62277 - RNA, 19 nt, Artificial Sequence
  Sense Oligo
gguaucucauuuucaguug

SEQ ID NO: 62278 - RNA, 19 nt, Artificial Sequence
  Antisense Oligo
caacugaaaaugagauacc

SEQ ID NO: 62279 - RNA, 19 nt, Artificial Sequence
  Sense Oligo
ccauuuaccgugaggcuga

SEQ ID NO: 62280 - RNA, 19 nt, Artificial Sequence
  Antisense Oligo
ucagccucacgguaaaugg

SEQ ID NO: 62281 - RNA, 19 nt, Artificial Sequence
  Sense Oligo
cauuuaccgugaggcugaa

SEQ ID NO: 62282 - RNA, 19 nt, Artificial Sequence
  Antisense Oligo
uucagccucacgguaaaug

SEQ ID NO: 62283 - RNA, 19 nt, Artificial Sequence
  Sense Oligo
uaucauccucugaauugcc

SEQ ID NO: 62284 - RNA, 19 nt, Artificial Sequence
  Antisense Oligo
ggcaauucagaggaugaua

SEQ ID NO: 62285 - RNA, 19 nt, Artificial Sequence
  Sense Oligo
aucauccucugaauugccu

SEQ ID NO: 62286 - RNA, 19 nt, Artificial Sequence
  Antisense Oligo
aggcaauucagaggaugau

SEQ ID NO: 62287 - RNA, 19 nt, Artificial Sequence
  Sense Oligo
ugucucacucccacccaag

SEQ ID NO: 62288 - RNA, 19 nt, Artificial Sequence
  Antisense Oligo
cuugggugggagugagaca

SEQ ID NO: 62289 - RNA, 19 nt, Artificial Sequence
  Sense Oligo
gucucacucccacccaagc

SEQ ID NO: 62290 - RNA, 19 nt, Artificial Sequence
  Antisense Oligo
gcuugggugggagugagac

SEQ ID NO: 62291 - RNA, 19 nt, Artificial Sequence
  Sense Oligo
ucucacucccacccaagcu

SEQ ID NO: 62292 - RNA, 19 nt, Artificial Sequence
  Antisense Oligo
agcuugggugggagugaga

SEQ ID NO: 62293 - RNA, 19 nt, Artificial Sequence
  Sense Oligo
ucacucccacccaagcugg

SEQ ID NO: 62294 - RNA, 19 nt, Artificial Sequence
  Antisense Oligo
ccagcuugggugggaguga

SEQ ID NO: 62295 - RNA, 19 nt, Artificial Sequence
  Sense Oligo
cacucccacccaagcugga

SEQ ID NO: 62296 - RNA, 19 nt, Artificial Sequence
  Antisense Oligo
uccagcuugggugggagug

SEQ ID NO: 62297 - RNA, 19 nt, Artificial Sequence
  Sense Oligo
ucaaucgauucuccugccu

SEQ ID NO: 62298 - RNA, 19 nt, Artificial Sequence
  Antisense Oligo
aggcaggagaaucgauuga

SEQ ID NO: 62299 - RNA, 19 nt, Artificial Sequence
  Sense Oligo
cgauucuccugccuuagcc

SEQ ID NO: 62300 - RNA, 19 nt, Artificial Sequence
  Antisense Oligo
ggcuaaggcaggagaaucg

SEQ ID NO: 62301 - RNA, 19 nt, Artificial Sequence
  Sense Oligo
cccuaguagcugggauuac

SEQ ID NO: 62302 - RNA, 19 nt, Artificial Sequence
  Antisense Oligo
guaaucccagcuacuaggg

SEQ ID NO: 62303 - RNA, 19 nt, Artificial Sequence
  Sense Oligo
ccuaguagcugggauuaca

SEQ ID NO: 62304 - RNA, 19 nt, Artificial Sequence
  Antisense Oligo
uguaaucccagcuacuagg

SEQ ID NO: 62305 - RNA, 19 nt, Artificial Sequence
  Sense Oligo
cuaguagcugggauuacag

SEQ ID NO: 62306 - RNA, 19 nt, Artificial Sequence
  Antisense Oligo
cuguaaucccagcuacuag

SEQ ID NO: 62307 - RNA, 19 nt, Artificial Sequence
  Sense Oligo
uagcugggauuacaggugc

SEQ ID NO: 62308 - RNA, 19 nt, Artificial Sequence
  Antisense Oligo
gcaccuguaaucccagcua

SEQ ID NO: 62309 - RNA, 19 nt, Artificial Sequence
  Sense Oligo
agcugggauuacaggugcc

SEQ ID NO: 62310 - RNA, 19 nt, Artificial Sequence
  Antisense Oligo
ggcaccuguaaucccagcu

SEQ ID NO: 62311 - RNA, 19 nt, Artificial Sequence
  Sense Oligo
gcugggauuacaggugcca

SEQ ID NO: 62312 - RNA, 19 nt, Artificial Sequence
  Antisense Oligo
uggcaccuguaaucccagc

SEQ ID NO: 62313 - RNA, 19 nt, Artificial Sequence
  Sense Oligo
caggugccaaccaucacgc

SEQ ID NO: 62314 - RNA, 19 nt, Artificial Sequence
  Antisense Oligo
gcgugaugguuggcaccug

SEQ ID NO: 62315 - RNA, 19 nt, Artificial Sequence
  Sense Oligo
aggugccaaccaucacgcc

SEQ ID NO: 62316 - RNA, 19 nt, Artificial Sequence
  Antisense Oligo
ggcgugaugguuggcaccu

SEQ ID NO: 62317 - RNA, 19 nt, Artificial Sequence
  Sense Oligo
ccaaccaucacgcccagcu

SEQ ID NO: 62318 - RNA, 19 nt, Artificial Sequence
  Antisense Oligo
agcugggcgugaugguugg

SEQ ID NO: 62319 - RNA, 19 nt, Artificial Sequence
  Sense Oligo
caaccaucacgcccagcua

SEQ ID NO: 62320 - RNA, 19 nt, Artificial Sequence
  Antisense Oligo
uagcugggcgugaugguug

SEQ ID NO: 62321 - RNA, 19 nt, Artificial Sequence
  Sense Oligo
aaccaucacgcccagcuaa

SEQ ID NO: 62322 - RNA, 19 nt, Artificial Sequence
  Antisense Oligo
uuagcugggcgugaugguu

SEQ ID NO: 62323 - RNA, 19 nt, Artificial Sequence
  Sense Oligo
accaucacgcccagcuaau

SEQ ID NO: 62324 - RNA, 19 nt, Artificial Sequence
  Antisense Oligo
auuagcugggcgugauggu

SEQ ID NO: 62325 - RNA, 19 nt, Artificial Sequence
  Sense Oligo
ccaucacgcccagcuaauu

SEQ ID NO: 62326 - RNA, 19 nt, Artificial Sequence
  Antisense Oligo
aauuagcugggcgugaugg

SEQ ID NO: 62327 - RNA, 19 nt, Artificial Sequence
  Sense Oligo
caucacgcccagcuaauuu

SEQ ID NO: 62328 - RNA, 19 nt, Artificial Sequence
  Antisense Oligo
aaauuagcugggcgugaug

SEQ ID NO: 62329 - RNA, 19 nt, Artificial Sequence
  Sense Oligo
aucacgcccagcuaauuuu

SEQ ID NO: 62330 - RNA, 19 nt, Artificial Sequence
  Antisense Oligo
aaaauuagcugggcgugau

SEQ ID NO: 62331 - RNA, 19 nt, Artificial Sequence
  Sense Oligo
ggguuucuccacguggcca

SEQ ID NO: 62332 - RNA, 19 nt, Artificial Sequence
  Antisense Oligo
uggccacguggagaaaccc

SEQ ID NO: 62333 - RNA, 19 nt, Artificial Sequence
  Sense Oligo
gguuucuccacguggccag

SEQ ID NO: 62334 - RNA, 19 nt, Artificial Sequence
  Antisense Oligo
cuggccacguggagaaacc

SEQ ID NO: 62335 - RNA, 19 nt, Artificial Sequence
  Sense Oligo
gagcuccugaccucaagug

SEQ ID NO: 62336 - RNA, 19 nt, Artificial Sequence
  Antisense Oligo
cacuugaggucaggagcuc

SEQ ID NO: 62337 - RNA, 19 nt, Artificial Sequence
  Sense Oligo
agcuccugaccucaaguga

SEQ ID NO: 62338 - RNA, 19 nt, Artificial Sequence
  Antisense Oligo
ucacuugaggucaggagcu

SEQ ID NO: 62339 - RNA, 19 nt, Artificial Sequence
  Sense Oligo
cuuuggccaccacacccag

SEQ ID NO: 62340 - RNA, 19 nt, Artificial Sequence
  Antisense Oligo
cugggugugguggccaaag

SEQ ID NO: 62341 - RNA, 19 nt, Artificial Sequence
  Sense Oligo
uuuggccaccacacccagc

SEQ ID NO: 62342 - RNA, 19 nt, Artificial Sequence
  Antisense Oligo
gcugggugugguggccaaa

SEQ ID NO: 62343 - RNA, 19 nt, Artificial Sequence
  Sense Oligo
ccaccacacccagccuaaa

SEQ ID NO: 62344 - RNA, 19 nt, Artificial Sequence
  Antisense Oligo
uuuaggcuggguguggugg

SEQ ID NO: 62345 - RNA, 19 nt, Artificial Sequence
  Sense Oligo
acacccagccuaaauuacc

SEQ ID NO: 62346 - RNA, 19 nt, Artificial Sequence
  Antisense Oligo
gguaauuuaggcugggugu

SEQ ID NO: 62347 - RNA, 19 nt, Artificial Sequence
  Sense Oligo
cacccagccuaaauuaccu

SEQ ID NO: 62348 - RNA, 19 nt, Artificial Sequence
  Antisense Oligo
agguaauuuaggcugggug

SEQ ID NO: 62349 - RNA, 19 nt, Artificial Sequence
  Sense Oligo
cagccuaaauuaccucuuc

SEQ ID NO: 62350 - RNA, 19 nt, Artificial Sequence
  Antisense Oligo
gaagagguaauuuaggcug

SEQ ID NO: 62351 - RNA, 19 nt, Artificial Sequence
  Sense Oligo
agccuaaauuaccucuucg

SEQ ID NO: 62352 - RNA, 19 nt, Artificial Sequence
  Antisense Oligo
cgaagagguaauuuaggcu

SEQ ID NO: 62353 - RNA, 19 nt, Artificial Sequence
  Sense Oligo
gccuaaauuaccucuucgu

SEQ ID NO: 62354 - RNA, 19 nt, Artificial Sequence
  Antisense Oligo
acgaagagguaauuuaggc

SEQ ID NO: 62355 - RNA, 19 nt, Artificial Sequence
  Sense Oligo
ccuaaauuaccucuucgua

SEQ ID NO: 62356 - RNA, 19 nt, Artificial Sequence
  Antisense Oligo
uacgaagagguaauuuagg

SEQ ID NO: 62357 - RNA, 19 nt, Artificial Sequence
  Sense Oligo
cuaaauuaccucuucguau

SEQ ID NO: 62358 - RNA, 19 nt, Artificial Sequence
  Antisense Oligo
auacgaagagguaauuuag

SEQ ID NO: 62359 - RNA, 19 nt, Artificial Sequence
  Sense Oligo
uaaauuaccucuucguauc

SEQ ID NO: 62360 - RNA, 19 nt, Artificial Sequence
  Antisense Oligo
gauacgaagagguaauuua

SEQ ID NO: 62361 - RNA, 19 nt, Artificial Sequence
  Sense Oligo
aaauuaccucuucguaucu

SEQ ID NO: 62362 - RNA, 19 nt, Artificial Sequence
  Antisense Oligo
agauacgaagagguaauuu

SEQ ID NO: 62363 - RNA, 19 nt, Artificial Sequence
  Sense Oligo
aauuaccucuucguaucuu

SEQ ID NO: 62364 - RNA, 19 nt, Artificial Sequence
  Antisense Oligo
aagauacgaagagguaauu

SEQ ID NO: 62365 - RNA, 19 nt, Artificial Sequence
  Sense Oligo
auuaccucuucguaucuuu

SEQ ID NO: 62366 - RNA, 19 nt, Artificial Sequence
  Antisense Oligo
aaagauacgaagagguaau

SEQ ID NO: 62367 - RNA, 19 nt, Artificial Sequence
  Sense Oligo
uuaccucuucguaucuuuu

SEQ ID NO: 62368 - RNA, 19 nt, Artificial Sequence
  Antisense Oligo
aaaagauacgaagagguaa

SEQ ID NO: 62369 - RNA, 19 nt, Artificial Sequence
  Sense Oligo
uuucuuuugcgcuuugucu

SEQ ID NO: 62370 - RNA, 19 nt, Artificial Sequence
  Antisense Oligo
agacaaagcgcaaaagaaa

SEQ ID NO: 62371 - RNA, 19 nt, Artificial Sequence
  Sense Oligo
uucuuuugcgcuuugucuc

SEQ ID NO: 62372 - RNA, 19 nt, Artificial Sequence
  Antisense Oligo
gagacaaagcgcaaaagaa

SEQ ID NO: 62373 - RNA, 19 nt, Artificial Sequence
  Sense Oligo
ucuuuugcgcuuugucucu

SEQ ID NO: 62374 - RNA, 19 nt, Artificial Sequence
  Antisense Oligo
agagacaaagcgcaaaaga

SEQ ID NO: 62375 - RNA, 19 nt, Artificial Sequence
  Sense Oligo
cuuuugcgcuuugucucug

SEQ ID NO: 62376 - RNA, 19 nt, Artificial Sequence
  Antisense Oligo
cagagacaaagcgcaaaag

SEQ ID NO: 62377 - RNA, 19 nt, Artificial Sequence
  Sense Oligo
uuuugcgcuuugucucugu

SEQ ID NO: 62378 - RNA, 19 nt, Artificial Sequence
  Antisense Oligo
acagagacaaagcgcaaaa

SEQ ID NO: 62379 - RNA, 19 nt, Artificial Sequence
  Sense Oligo
uuugcgcuuugucucugua

SEQ ID NO: 62380 - RNA, 19 nt, Artificial Sequence
  Antisense Oligo
uacagagacaaagcgcaaa

SEQ ID NO: 62381 - RNA, 19 nt, Artificial Sequence
  Sense Oligo
uugcgcuuugucucuguaa

SEQ ID NO: 62382 - RNA, 19 nt, Artificial Sequence
  Antisense Oligo
uuacagagacaaagcgcaa

SEQ ID NO: 62383 - RNA, 19 nt, Artificial Sequence
  Sense Oligo
ugcgcuuugucucuguaau

SEQ ID NO: 62384 - RNA, 19 nt, Artificial Sequence
  Antisense Oligo
auuacagagacaaagcgca

SEQ ID NO: 62385 - RNA, 19 nt, Artificial Sequence
  Sense Oligo
gcgcuuugucucuguaaug

SEQ ID NO: 62386 - RNA, 19 nt, Artificial Sequence
  Antisense Oligo
cauuacagagacaaagcgc

SEQ ID NO: 62387 - RNA, 19 nt, Artificial Sequence
  Sense Oligo
gcuuugucucuguaauggu

SEQ ID NO: 62388 - RNA, 19 nt, Artificial Sequence
  Antisense Oligo
accauuacagagacaaagc

SEQ ID NO: 62389 - RNA, 19 nt, Artificial Sequence
  Sense Oligo
cuuugucucuguaaugguu

SEQ ID NO: 62390 - RNA, 19 nt, Artificial Sequence
  Antisense Oligo
aaccauuacagagacaaag

SEQ ID NO: 62391 - RNA, 19 nt, Artificial Sequence
  Sense Oligo
uuugucucuguaaugguug

SEQ ID NO: 62392 - RNA, 19 nt, Artificial Sequence
  Antisense Oligo
caaccauuacagagacaaa

SEQ ID NO: 62393 - RNA, 19 nt, Artificial Sequence
  Sense Oligo
ugucucuguaaugguugug

SEQ ID NO: 62394 - RNA, 19 nt, Artificial Sequence
  Antisense Oligo
cacaaccauuacagagaca

SEQ ID NO: 62395 - RNA, 19 nt, Artificial Sequence
  Sense Oligo
gguucaucuucucugccgu

SEQ ID NO: 62396 - RNA, 19 nt, Artificial Sequence
  Antisense Oligo
acggcagagaagaugaacc

SEQ ID NO: 62397 - RNA, 19 nt, Artificial Sequence
  Sense Oligo
guucaucuucucugccgug

SEQ ID NO: 62398 - RNA, 19 nt, Artificial Sequence
  Antisense Oligo
cacggcagagaagaugaac

SEQ ID NO: 62399 - RNA, 19 nt, Artificial Sequence
  Sense Oligo
uucaucuucucugccgugu

SEQ ID NO: 62400 - RNA, 19 nt, Artificial Sequence
  Antisense Oligo
acacggcagagaagaugaa

SEQ ID NO: 62401 - RNA, 19 nt, Artificial Sequence
  Sense Oligo
ucaucuucucugccgugug

SEQ ID NO: 62402 - RNA, 19 nt, Artificial Sequence
  Antisense Oligo
cacacggcagagaagauga

SEQ ID NO: 62403 - RNA, 19 nt, Artificial Sequence
  Sense Oligo
caucuucucugccgugugc

SEQ ID NO: 62404 - RNA, 19 nt, Artificial Sequence
  Antisense Oligo
gcacacggcagagaagaug

SEQ ID NO: 62405 - RNA, 19 nt, Artificial Sequence
  Sense Oligo
aucuucucugccgugugcc

SEQ ID NO: 62406 - RNA, 19 nt, Artificial Sequence
  Antisense Oligo
ggcacacggcagagaagau

SEQ ID NO: 62407 - RNA, 19 nt, Artificial Sequence
  Sense Oligo
ucuucucugccgugugcca

SEQ ID NO: 62408 - RNA, 19 nt, Artificial Sequence
  Antisense Oligo
uggcacacggcagagaaga

SEQ ID NO: 62409 - RNA, 19 nt, Artificial Sequence
  Sense Oligo
ugcucuauuucagccuuua

SEQ ID NO: 62410 - RNA, 19 nt, Artificial Sequence
  Antisense Oligo
uaaaggcugaaauagagca

SEQ ID NO: 62411 - RNA, 19 nt, Artificial Sequence
  Sense Oligo
gcucuauuucagccuuuaa

SEQ ID NO: 62412 - RNA, 19 nt, Artificial Sequence
  Antisense Oligo
uuaaaggcugaaauagagc

SEQ ID NO: 62413 - RNA, 19 nt, Artificial Sequence
  Sense Oligo
cucuauuucagccuuuaau

SEQ ID NO: 62414 - RNA, 19 nt, Artificial Sequence
  Antisense Oligo
auuaaaggcugaaauagag

SEQ ID NO: 62415 - RNA, 19 nt, Artificial Sequence
  Sense Oligo
cugacagaauuuuccuaua

SEQ ID NO: 62416 - RNA, 19 nt, Artificial Sequence
  Antisense Oligo
uauaggaaaauucugucag

SEQ ID NO: 62417 - RNA, 19 nt, Artificial Sequence
  Sense Oligo
cagaauuuuccuauaaagg

SEQ ID NO: 62418 - RNA, 19 nt, Artificial Sequence
  Antisense Oligo
ccuuuauaggaaaauucug

SEQ ID NO: 62419 - RNA, 19 nt, Artificial Sequence
  Sense Oligo
agaauuuuccuauaaaggg

SEQ ID NO: 62420 - RNA, 19 nt, Artificial Sequence
  Antisense Oligo
cccuuuauaggaaaauucu

SEQ ID NO: 62421 - RNA, 19 nt, Artificial Sequence
  Sense Oligo
gaauuuuccuauaaagggu

SEQ ID NO: 62422 - RNA, 19 nt, Artificial Sequence
  Antisense Oligo
acccuuuauaggaaaauuc

SEQ ID NO: 62423 - RNA, 19 nt, Artificial Sequence
  Sense Oligo
uuuccuauaaagggucucu

SEQ ID NO: 62424 - RNA, 19 nt, Artificial Sequence
  Antisense Oligo
agagacccuuuauaggaaa

SEQ ID NO: 62425 - RNA, 19 nt, Artificial Sequence
  Sense Oligo
uuccuauaaagggucucua

SEQ ID NO: 62426 - RNA, 19 nt, Artificial Sequence
  Antisense Oligo
uagagacccuuuauaggaa

SEQ ID NO: 62427 - RNA, 19 nt, Artificial Sequence
  Sense Oligo
uccuauaaagggucucuau

SEQ ID NO: 62428 - RNA, 19 nt, Artificial Sequence
  Antisense Oligo
auagagacccuuuauagga

SEQ ID NO: 62429 - RNA, 19 nt, Artificial Sequence
  Sense Oligo
agauggagucuugcugugu

SEQ ID NO: 62430 - RNA, 19 nt, Artificial Sequence
  Antisense Oligo
acacagcaagacuccaucu

SEQ ID NO: 62431 - RNA, 19 nt, Artificial Sequence
  Sense Oligo
gauggagucuugcuguguc

SEQ ID NO: 62432 - RNA, 19 nt, Artificial Sequence
  Antisense Oligo
gacacagcaagacuccauc

SEQ ID NO: 62433 - RNA, 19 nt, Artificial Sequence
  Sense Oligo
gucauccaggcuagagugc

SEQ ID NO: 62434 - RNA, 19 nt, Artificial Sequence
  Antisense Oligo
gcacucuagccuggaugac

SEQ ID NO: 62435 - RNA, 19 nt, Artificial Sequence
  Sense Oligo
ucauccaggcuagagugca

SEQ ID NO: 62436 - RNA, 19 nt, Artificial Sequence
  Antisense Oligo
ugcacucuagccuggauga

SEQ ID NO: 62437 - RNA, 19 nt, Artificial Sequence
  Sense Oligo
cauccaggcuagagugcaa

SEQ ID NO: 62438 - RNA, 19 nt, Artificial Sequence
  Antisense Oligo
uugcacucuagccuggaug

SEQ ID NO: 62439 - RNA, 19 nt, Artificial Sequence
  Sense Oligo
caggcuagagugcaauggu

SEQ ID NO: 62440 - RNA, 19 nt, Artificial Sequence
  Antisense Oligo
accauugcacucuagccug

SEQ ID NO: 62441 - RNA, 19 nt, Artificial Sequence
  Sense Oligo
aggcuagagugcaauggug

SEQ ID NO: 62442 - RNA, 19 nt, Artificial Sequence
  Antisense Oligo
caccauugcacucuagccu

SEQ ID NO: 62443 - RNA, 19 nt, Artificial Sequence
  Sense Oligo
auggugucaucuuagcuca

SEQ ID NO: 62444 - RNA, 19 nt, Artificial Sequence
  Antisense Oligo
ugagcuaagaugacaccau

SEQ ID NO: 62445 - RNA, 19 nt, Artificial Sequence
  Sense Oligo
caucuuagcucacugcaac

SEQ ID NO: 62446 - RNA, 19 nt, Artificial Sequence
  Antisense Oligo
guugcagugagcuaagaug

SEQ ID NO: 62447 - RNA, 19 nt, Artificial Sequence
  Sense Oligo
aucuuagcucacugcaacc

SEQ ID NO: 62448 - RNA, 19 nt, Artificial Sequence
  Antisense Oligo
gguugcagugagcuaagau

SEQ ID NO: 62449 - RNA, 19 nt, Artificial Sequence
  Sense Oligo
ucuuagcucacugcaaccu

SEQ ID NO: 62450 - RNA, 19 nt, Artificial Sequence
  Antisense Oligo
agguugcagugagcuaaga

SEQ ID NO: 62451 - RNA, 19 nt, Artificial Sequence
  Sense Oligo
accucugccuccuggguuc

SEQ ID NO: 62452 - RNA, 19 nt, Artificial Sequence
  Antisense Oligo
gaacccaggaggcagaggu

SEQ ID NO: 62453 - RNA, 19 nt, Artificial Sequence
  Sense Oligo
ccucugccuccuggguuca

SEQ ID NO: 62454 - RNA, 19 nt, Artificial Sequence
  Antisense Oligo
ugaacccaggaggcagagg

SEQ ID NO: 62455 - RNA, 19 nt, Artificial Sequence
  Sense Oligo
cucugccuccuggguucaa

SEQ ID NO: 62456 - RNA, 19 nt, Artificial Sequence
  Antisense Oligo
uugaacccaggaggcagag

SEQ ID NO: 62457 - RNA, 19 nt, Artificial Sequence
  Sense Oligo
ucugccuccuggguucaag

SEQ ID NO: 62458 - RNA, 19 nt, Artificial Sequence
  Antisense Oligo
cuugaacccaggaggcaga

SEQ ID NO: 62459 - RNA, 19 nt, Artificial Sequence
  Sense Oligo
cugccuccuggguucaagc

SEQ ID NO: 62460 - RNA, 19 nt, Artificial Sequence
  Antisense Oligo
gcuugaacccaggaggcag

SEQ ID NO: 62461 - RNA, 19 nt, Artificial Sequence
  Sense Oligo
ugccuccuggguucaagcg

SEQ ID NO: 62462 - RNA, 19 nt, Artificial Sequence
  Antisense Oligo
cgcuugaacccaggaggca

SEQ ID NO: 62463 - RNA, 19 nt, Artificial Sequence
  Sense Oligo
gccuccuggguucaagcga

SEQ ID NO: 62464 - RNA, 19 nt, Artificial Sequence
  Antisense Oligo
ucgcuugaacccaggaggc

SEQ ID NO: 62465 - RNA, 19 nt, Artificial Sequence
  Sense Oligo
ccuccuggguucaagcgau

SEQ ID NO: 62466 - RNA, 19 nt, Artificial Sequence
  Antisense Oligo
aucgcuugaacccaggagg

SEQ ID NO: 62467 - RNA, 19 nt, Artificial Sequence
  Sense Oligo
cuccuggguucaagcgauu

SEQ ID NO: 62468 - RNA, 19 nt, Artificial Sequence
  Antisense Oligo
aaucgcuugaacccaggag

SEQ ID NO: 62469 - RNA, 19 nt, Artificial Sequence
  Sense Oligo
uccuggguucaagcgauuc

SEQ ID NO: 62470 - RNA, 19 nt, Artificial Sequence
  Antisense Oligo
gaaucgcuugaacccagga

SEQ ID NO: 62471 - RNA, 19 nt, Artificial Sequence
  Sense Oligo
ccuggguucaagcgauucu

SEQ ID NO: 62472 - RNA, 19 nt, Artificial Sequence
  Antisense Oligo
agaaucgcuugaacccagg

SEQ ID NO: 62473 - RNA, 19 nt, Artificial Sequence
  Sense Oligo
cuggguucaagcgauucuc

SEQ ID NO: 62474 - RNA, 19 nt, Artificial Sequence
  Antisense Oligo
gagaaucgcuugaacccag

SEQ ID NO: 62475 - RNA, 19 nt, Artificial Sequence
  Sense Oligo
uggguucaagcgauucucc

SEQ ID NO: 62476 - RNA, 19 nt, Artificial Sequence
  Antisense Oligo
ggagaaucgcuugaaccca

SEQ ID NO: 62477 - RNA, 19 nt, Artificial Sequence
  Sense Oligo
ggguucaagcgauucuccu

SEQ ID NO: 62478 - RNA, 19 nt, Artificial Sequence
  Antisense Oligo
aggagaaucgcuugaaccc

SEQ ID NO: 62479 - RNA, 19 nt, Artificial Sequence
  Sense Oligo
gguucaagcgauucuccug

SEQ ID NO: 62480 - RNA, 19 nt, Artificial Sequence
  Antisense Oligo
caggagaaucgcuugaacc

SEQ ID NO: 62481 - RNA, 19 nt, Artificial Sequence
  Sense Oligo
guucaagcgauucuccugc

SEQ ID NO: 62482 - RNA, 19 nt, Artificial Sequence
  Antisense Oligo
gcaggagaaucgcuugaac

SEQ ID NO: 62483 - RNA, 19 nt, Artificial Sequence
  Sense Oligo
uucaagcgauucuccugcc

SEQ ID NO: 62484 - RNA, 19 nt, Artificial Sequence
  Antisense Oligo
ggcaggagaaucgcuugaa

SEQ ID NO: 62485 - RNA, 19 nt, Artificial Sequence
  Sense Oligo
ucaagcgauucuccugccu

SEQ ID NO: 62486 - RNA, 19 nt, Artificial Sequence
  Antisense Oligo
aggcaggagaaucgcuuga

SEQ ID NO: 62487 - RNA, 19 nt, Artificial Sequence
  Sense Oligo
ugccucagccucccgagua

SEQ ID NO: 62488 - RNA, 19 nt, Artificial Sequence
  Antisense Oligo
uacucgggaggcugaggca

SEQ ID NO: 62489 - RNA, 19 nt, Artificial Sequence
  Sense Oligo
cucagccucccgaguagcu

SEQ ID NO: 62490 - RNA, 19 nt, Artificial Sequence
  Antisense Oligo
agcuacucgggaggcugag

SEQ ID NO: 62491 - RNA, 19 nt, Artificial Sequence
  Sense Oligo
cugggacuacaggcaugca

SEQ ID NO: 62492 - RNA, 19 nt, Artificial Sequence
  Antisense Oligo
ugcaugccuguagucccag

SEQ ID NO: 62493 - RNA, 19 nt, Artificial Sequence
  Sense Oligo
ugggacuacaggcaugcac

SEQ ID NO: 62494 - RNA, 19 nt, Artificial Sequence
  Antisense Oligo
gugcaugccuguaguccca

SEQ ID NO: 62495 - RNA, 19 nt, Artificial Sequence
  Sense Oligo
gggacuacaggcaugcacc

SEQ ID NO: 62496 - RNA, 19 nt, Artificial Sequence
  Antisense Oligo
ggugcaugccuguaguccc

SEQ ID NO: 62497 - RNA, 19 nt, Artificial Sequence
  Sense Oligo
ggacuacaggcaugcaccu

SEQ ID NO: 62498 - RNA, 19 nt, Artificial Sequence
  Antisense Oligo
aggugcaugccuguagucc

SEQ ID NO: 62499 - RNA, 19 nt, Artificial Sequence
  Sense Oligo
agacggguuucaccauguu

SEQ ID NO: 62500 - RNA, 19 nt, Artificial Sequence
  Antisense Oligo
aacauggugaaacccgucu

SEQ ID NO: 62501 - RNA, 19 nt, Artificial Sequence
  Sense Oligo
gacggguuucaccauguug

SEQ ID NO: 62502 - RNA, 19 nt, Artificial Sequence
  Antisense Oligo
caacauggugaaacccguc

SEQ ID NO: 62503 - RNA, 19 nt, Artificial Sequence
  Sense Oligo
gguuucaccauguugacca

SEQ ID NO: 62504 - RNA, 19 nt, Artificial Sequence
  Antisense Oligo
uggucaacauggugaaacc

SEQ ID NO: 62505 - RNA, 19 nt, Artificial Sequence
  Sense Oligo
ugaccucaagugaucugcc

SEQ ID NO: 62506 - RNA, 19 nt, Artificial Sequence
  Antisense Oligo
ggcagaucacuugagguca

SEQ ID NO: 62507 - RNA, 19 nt, Artificial Sequence
  Sense Oligo
gaccucaagugaucugccc

SEQ ID NO: 62508 - RNA, 19 nt, Artificial Sequence
  Antisense Oligo
gggcagaucacuugagguc

SEQ ID NO: 62509 - RNA, 19 nt, Artificial Sequence
  Sense Oligo
accucaagugaucugcccg

SEQ ID NO: 62510 - RNA, 19 nt, Artificial Sequence
  Antisense Oligo
cgggcagaucacuugaggu

SEQ ID NO: 62511 - RNA, 19 nt, Artificial Sequence
  Sense Oligo
ccucaagugaucugcccgu

SEQ ID NO: 62512 - RNA, 19 nt, Artificial Sequence
  Antisense Oligo
acgggcagaucacuugagg

SEQ ID NO: 62513 - RNA, 19 nt, Artificial Sequence
  Sense Oligo
cucaagugaucugcccguc

SEQ ID NO: 62514 - RNA, 19 nt, Artificial Sequence
  Antisense Oligo
gacgggcagaucacuugag

SEQ ID NO: 62515 - RNA, 19 nt, Artificial Sequence
  Sense Oligo
ucucggccucccaaagugc

SEQ ID NO: 62516 - RNA, 19 nt, Artificial Sequence
  Antisense Oligo
gcacuuugggaggccgaga

SEQ ID NO: 62517 - RNA, 19 nt, Artificial Sequence
  Sense Oligo
cucggccucccaaagugcu

SEQ ID NO: 62518 - RNA, 19 nt, Artificial Sequence
  Antisense Oligo
agcacuuugggaggccgag

SEQ ID NO: 62519 - RNA, 19 nt, Artificial Sequence
  Sense Oligo
ucggccucccaaagugcua

SEQ ID NO: 62520 - RNA, 19 nt, Artificial Sequence
  Antisense Oligo
uagcacuuugggaggccga

SEQ ID NO: 62521 - RNA, 19 nt, Artificial Sequence
  Sense Oligo
cggccucccaaagugcuag

SEQ ID NO: 62522 - RNA, 19 nt, Artificial Sequence
  Antisense Oligo
cuagcacuuugggaggccg

SEQ ID NO: 62523 - RNA, 19 nt, Artificial Sequence
  Sense Oligo
auuacaggcgugagccacu

SEQ ID NO: 62524 - RNA, 19 nt, Artificial Sequence
  Antisense Oligo
aguggcucacgccuguaau

SEQ ID NO: 62525 - RNA, 19 nt, Artificial Sequence
  Sense Oligo
acuuguuuuauucaccagu

SEQ ID NO: 62526 - RNA, 19 nt, Artificial Sequence
  Antisense Oligo
acuggugaauaaaacaagu

SEQ ID NO: 62527 - RNA, 19 nt, Artificial Sequence
  Sense Oligo
cuuguuuuauucaccaguu

SEQ ID NO: 62528 - RNA, 19 nt, Artificial Sequence
  Antisense Oligo
aacuggugaauaaaacaag

SEQ ID NO: 62529 - RNA, 19 nt, Artificial Sequence
  Sense Oligo
ucaccaguuuauguuuagg

SEQ ID NO: 62530 - RNA, 19 nt, Artificial Sequence
  Antisense Oligo
ccuaaacauaaacugguga

SEQ ID NO: 62531 - RNA, 19 nt, Artificial Sequence
  Sense Oligo
caccaguuuauguuuaggu

SEQ ID NO: 62532 - RNA, 19 nt, Artificial Sequence
  Antisense Oligo
accuaaacauaaacuggug

SEQ ID NO: 62533 - RNA, 19 nt, Artificial Sequence
  Sense Oligo
accaguuuauguuuaggug

SEQ ID NO: 62534 - RNA, 19 nt, Artificial Sequence
  Antisense Oligo
caccuaaacauaaacuggu

SEQ ID NO: 62535 - RNA, 19 nt, Artificial Sequence
  Sense Oligo
ccaguuuauguuuaggugu

SEQ ID NO: 62536 - RNA, 19 nt, Artificial Sequence
  Antisense Oligo
acaccuaaacauaaacugg

SEQ ID NO: 62537 - RNA, 19 nt, Artificial Sequence
  Sense Oligo
caguuuauguuuaggugua

SEQ ID NO: 62538 - RNA, 19 nt, Artificial Sequence
  Antisense Oligo
uacaccuaaacauaaacug

SEQ ID NO: 62539 - RNA, 19 nt, Artificial Sequence
  Sense Oligo
acuugauguuuuccugacu

SEQ ID NO: 62540 - RNA, 19 nt, Artificial Sequence
  Antisense Oligo
agucaggaaaacaucaagu

SEQ ID NO: 62541 - RNA, 19 nt, Artificial Sequence
  Sense Oligo
cuugauguuuuccugacua

SEQ ID NO: 62542 - RNA, 19 nt, Artificial Sequence
  Antisense Oligo
uagucaggaaaacaucaag

SEQ ID NO: 62543 - RNA, 19 nt, Artificial Sequence
  Sense Oligo
gauguuuuccugacuagau

SEQ ID NO: 62544 - RNA, 19 nt, Artificial Sequence
  Antisense Oligo
aucuagucaggaaaacauc

SEQ ID NO: 62545 - RNA, 19 nt, Artificial Sequence
  Sense Oligo
uuuccugacuagaucauca

SEQ ID NO: 62546 - RNA, 19 nt, Artificial Sequence
  Antisense Oligo
ugaugaucuagucaggaaa

SEQ ID NO: 62547 - RNA, 19 nt, Artificial Sequence
  Sense Oligo
uccugacuagaucaucaaa

SEQ ID NO: 62548 - RNA, 19 nt, Artificial Sequence
  Antisense Oligo
uuugaugaucuagucagga

SEQ ID NO: 62549 - RNA, 19 nt, Artificial Sequence
  Sense Oligo
acuccagucuuccucacca

SEQ ID NO: 62550 - RNA, 19 nt, Artificial Sequence
  Antisense Oligo
uggugaggaagacuggagu

SEQ ID NO: 62551 - RNA, 19 nt, Artificial Sequence
  Sense Oligo
cuccagucuuccucaccaa

SEQ ID NO: 62552 - RNA, 19 nt, Artificial Sequence
  Antisense Oligo
uuggugaggaagacuggag

SEQ ID NO: 62553 - RNA, 19 nt, Artificial Sequence
  Sense Oligo
cagucuuccucaccaauau

SEQ ID NO: 62554 - RNA, 19 nt, Artificial Sequence
  Antisense Oligo
auauuggugaggaagacug

SEQ ID NO: 62555 - RNA, 19 nt, Artificial Sequence
  Sense Oligo
agucuuccucaccaauaug

SEQ ID NO: 62556 - RNA, 19 nt, Artificial Sequence
  Antisense Oligo
cauauuggugaggaagacu

SEQ ID NO: 62557 - RNA, 19 nt, Artificial Sequence
  Sense Oligo
gucuuccucaccaauaugu

SEQ ID NO: 62558 - RNA, 19 nt, Artificial Sequence
  Antisense Oligo
acauauuggugaggaagac

SEQ ID NO: 62559 - RNA, 19 nt, Artificial Sequence
  Sense Oligo
ucuuccucaccaauauguu

SEQ ID NO: 62560 - RNA, 19 nt, Artificial Sequence
  Antisense Oligo
aacauauuggugaggaaga

SEQ ID NO: 62561 - RNA, 19 nt, Artificial Sequence
  Sense Oligo
cuuccucaccaauauguuu

SEQ ID NO: 62562 - RNA, 19 nt, Artificial Sequence
  Antisense Oligo
aaacauauuggugaggaag

SEQ ID NO: 62563 - RNA, 19 nt, Artificial Sequence
  Sense Oligo
guuuccuauuugcuaucuu

SEQ ID NO: 62564 - RNA, 19 nt, Artificial Sequence
  Antisense Oligo
aagauagcaaauaggaaac

SEQ ID NO: 62565 - RNA, 19 nt, Artificial Sequence
  Sense Oligo
ugcuaucuuccuccauuau

SEQ ID NO: 62566 - RNA, 19 nt, Artificial Sequence
  Antisense Oligo
auaauggaggaagauagca

SEQ ID NO: 62567 - RNA, 19 nt, Artificial Sequence
  Sense Oligo
cuaucuuccuccauuaugc

SEQ ID NO: 62568 - RNA, 19 nt, Artificial Sequence
  Antisense Oligo
gcauaauggaggaagauag

SEQ ID NO: 62569 - RNA, 19 nt, Artificial Sequence
  Sense Oligo
aucuuccuccauuaugcua

SEQ ID NO: 62570 - RNA, 19 nt, Artificial Sequence
  Antisense Oligo
uagcauaauggaggaagau

SEQ ID NO: 62571 - RNA, 19 nt, Artificial Sequence
  Sense Oligo
ucuuccuccauuaugcuau

SEQ ID NO: 62572 - RNA, 19 nt, Artificial Sequence
  Antisense Oligo
auagcauaauggaggaaga

SEQ ID NO: 62573 - RNA, 19 nt, Artificial Sequence
  Sense Oligo
cuuccuccauuaugcuaug

SEQ ID NO: 62574 - RNA, 19 nt, Artificial Sequence
  Antisense Oligo
cauagcauaauggaggaag

SEQ ID NO: 62575 - RNA, 19 nt, Artificial Sequence
  Sense Oligo
cuccauuaugcuauguggc

SEQ ID NO: 62576 - RNA, 19 nt, Artificial Sequence
  Antisense Oligo
gccacauagcauaauggag

SEQ ID NO: 62577 - RNA, 19 nt, Artificial Sequence
  Sense Oligo
uccauuaugcuauguggca

SEQ ID NO: 62578 - RNA, 19 nt, Artificial Sequence
  Antisense Oligo
ugccacauagcauaaugga

SEQ ID NO: 62579 - RNA, 19 nt, Artificial Sequence
  Sense Oligo
agucuuuacuagccugugc

SEQ ID NO: 62580 - RNA, 19 nt, Artificial Sequence
  Antisense Oligo
gcacaggcuaguaaagacu

SEQ ID NO: 62581 - RNA, 19 nt, Artificial Sequence
  Sense Oligo
gucuuuacuagccugugcu

SEQ ID NO: 62582 - RNA, 19 nt, Artificial Sequence
  Antisense Oligo
agcacaggcuaguaaagac

SEQ ID NO: 62583 - RNA, 19 nt, Artificial Sequence
  Sense Oligo
ucuuuacuagccugugcuu

SEQ ID NO: 62584 - RNA, 19 nt, Artificial Sequence
  Antisense Oligo
aagcacaggcuaguaaaga

SEQ ID NO: 62585 - RNA, 19 nt, Artificial Sequence
  Sense Oligo
cuuuacuagccugugcuuu

SEQ ID NO: 62586 - RNA, 19 nt, Artificial Sequence
  Antisense Oligo
aaagcacaggcuaguaaag

SEQ ID NO: 62587 - RNA, 19 nt, Artificial Sequence
  Sense Oligo
uuuacuagccugugcuuuu

SEQ ID NO: 62588 - RNA, 19 nt, Artificial Sequence
  Antisense Oligo
aaaagcacaggcuaguaaa

SEQ ID NO: 62589 - RNA, 19 nt, Artificial Sequence
  Sense Oligo
uuacuagccugugcuuuuc

SEQ ID NO: 62590 - RNA, 19 nt, Artificial Sequence
  Antisense Oligo
gaaaagcacaggcuaguaa

SEQ ID NO: 62591 - RNA, 19 nt, Artificial Sequence
  Sense Oligo
uacuagccugugcuuuuca

SEQ ID NO: 62592 - RNA, 19 nt, Artificial Sequence
  Antisense Oligo
ugaaaagcacaggcuagua

SEQ ID NO: 62593 - RNA, 19 nt, Artificial Sequence
  Sense Oligo
acuagccugugcuuuucau

SEQ ID NO: 62594 - RNA, 19 nt, Artificial Sequence
  Antisense Oligo
augaaaagcacaggcuagu

SEQ ID NO: 62595 - RNA, 19 nt, Artificial Sequence
  Sense Oligo
cuagccugugcuuuucaug

SEQ ID NO: 62596 - RNA, 19 nt, Artificial Sequence
  Antisense Oligo
caugaaaagcacaggcuag

SEQ ID NO: 62597 - RNA, 19 nt, Artificial Sequence
  Sense Oligo
agccugugcuuuucaugua

SEQ ID NO: 62598 - RNA, 19 nt, Artificial Sequence
  Antisense Oligo
uacaugaaaagcacaggcu

SEQ ID NO: 62599 - RNA, 19 nt, Artificial Sequence
  Sense Oligo
gccugugcuuuucauguag

SEQ ID NO: 62600 - RNA, 19 nt, Artificial Sequence
  Antisense Oligo
cuacaugaaaagcacaggc

SEQ ID NO: 62601 - RNA, 19 nt, Artificial Sequence
  Sense Oligo
ccugugcuuuucauguaga

SEQ ID NO: 62602 - RNA, 19 nt, Artificial Sequence
  Antisense Oligo
ucuacaugaaaagcacagg

SEQ ID NO: 62603 - RNA, 19 nt, Artificial Sequence
  Sense Oligo
cugugcuuuucauguagau

SEQ ID NO: 62604 - RNA, 19 nt, Artificial Sequence
  Antisense Oligo
aucuacaugaaaagcacag

SEQ ID NO: 62605 - RNA, 19 nt, Artificial Sequence
  Sense Oligo
uuuccagucuuuguuaaug

SEQ ID NO: 62606 - RNA, 19 nt, Artificial Sequence
  Antisense Oligo
cauuaacaaagacuggaaa

SEQ ID NO: 62607 - RNA, 19 nt, Artificial Sequence
  Sense Oligo
uuuugaauggugaggccuu

SEQ ID NO: 62608 - RNA, 19 nt, Artificial Sequence
  Antisense Oligo
aaggccucaccauucaaaa

SEQ ID NO: 62609 - RNA, 19 nt, Artificial Sequence
  Sense Oligo
uuugaauggugaggccuug

SEQ ID NO: 62610 - RNA, 19 nt, Artificial Sequence
  Antisense Oligo
caaggccucaccauucaaa

SEQ ID NO: 62611 - RNA, 19 nt, Artificial Sequence
  Sense Oligo
uugaauggugaggccuugu

SEQ ID NO: 62612 - RNA, 19 nt, Artificial Sequence
  Antisense Oligo
acaaggccucaccauucaa

SEQ ID NO: 62613 - RNA, 19 nt, Artificial Sequence
  Sense Oligo
ugaauggugaggccuuguu

SEQ ID NO: 62614 - RNA, 19 nt, Artificial Sequence
  Antisense Oligo
aacaaggccucaccauuca

SEQ ID NO: 62615 - RNA, 19 nt, Artificial Sequence
  Sense Oligo
gaauggugaggccuuguuu

SEQ ID NO: 62616 - RNA, 19 nt, Artificial Sequence
  Antisense Oligo
aaacaaggccucaccauuc

SEQ ID NO: 62617 - RNA, 19 nt, Artificial Sequence
  Sense Oligo
aauggugaggccuuguuua

SEQ ID NO: 62618 - RNA, 19 nt, Artificial Sequence
  Antisense Oligo
uaaacaaggccucaccauu

SEQ ID NO: 62619 - RNA, 19 nt, Artificial Sequence
  Sense Oligo
auggugaggccuuguuuau

SEQ ID NO: 62620 - RNA, 19 nt, Artificial Sequence
  Antisense Oligo
auaaacaaggccucaccau

SEQ ID NO: 62621 - RNA, 19 nt, Artificial Sequence
  Sense Oligo
uggugaggccuuguuuaug

SEQ ID NO: 62622 - RNA, 19 nt, Artificial Sequence
  Antisense Oligo
cauaaacaaggccucacca

SEQ ID NO: 62623 - RNA, 19 nt, Artificial Sequence
  Sense Oligo
ggugaggccuuguuuaugc

SEQ ID NO: 62624 - RNA, 19 nt, Artificial Sequence
  Antisense Oligo
gcauaaacaaggccucacc

SEQ ID NO: 62625 - RNA, 19 nt, Artificial Sequence
  Sense Oligo
aggccuuguuuaugcaacc

SEQ ID NO: 62626 - RNA, 19 nt, Artificial Sequence
  Antisense Oligo
gguugcauaaacaaggccu

SEQ ID NO: 62627 - RNA, 19 nt, Artificial Sequence
  Sense Oligo
ggccuuguuuaugcaaccc

SEQ ID NO: 62628 - RNA, 19 nt, Artificial Sequence
  Antisense Oligo
ggguugcauaaacaaggcc

SEQ ID NO: 62629 - RNA, 19 nt, Artificial Sequence
  Sense Oligo
uuguuuaugcaacccugua

SEQ ID NO: 62630 - RNA, 19 nt, Artificial Sequence
  Antisense Oligo
uacaggguugcauaaacaa

SEQ ID NO: 62631 - RNA, 19 nt, Artificial Sequence
  Sense Oligo
uguuuaugcaacccuguaa

SEQ ID NO: 62632 - RNA, 19 nt, Artificial Sequence
  Antisense Oligo
uuacaggguugcauaaaca

SEQ ID NO: 62633 - RNA, 19 nt, Artificial Sequence
  Sense Oligo
uuaugcaacccuguaaaua

SEQ ID NO: 62634 - RNA, 19 nt, Artificial Sequence
  Antisense Oligo
uauuuacaggguugcauaa

SEQ ID NO: 62635 - RNA, 19 nt, Artificial Sequence
  Sense Oligo
uaugcaacccuguaaauaa

SEQ ID NO: 62636 - RNA, 19 nt, Artificial Sequence
  Antisense Oligo
uuauuuacaggguugcaua

SEQ ID NO: 62637 - RNA, 19 nt, Artificial Sequence
  Sense Oligo
augcaacccuguaaauaaa

SEQ ID NO: 62638 - RNA, 19 nt, Artificial Sequence
  Antisense Oligo
uuuauuuacaggguugcau

SEQ ID NO: 62639 - RNA, 19 nt, Artificial Sequence
  Sense Oligo
acaucaccuugcuagaggg

SEQ ID NO: 62640 - RNA, 19 nt, Artificial Sequence
  Antisense Oligo
cccucuagcaaggugaugu

SEQ ID NO: 62641 - RNA, 19 nt, Artificial Sequence
  Sense Oligo
caucaccuugcuagagggc

SEQ ID NO: 62642 - RNA, 19 nt, Artificial Sequence
  Antisense Oligo
gcccucuagcaaggugaug

SEQ ID NO: 62643 - RNA, 19 nt, Artificial Sequence
  Sense Oligo
aucaccuugcuagagggcc

SEQ ID NO: 62644 - RNA, 19 nt, Artificial Sequence
  Antisense Oligo
ggcccucuagcaaggugau

SEQ ID NO: 62645 - RNA, 19 nt, Artificial Sequence
  Sense Oligo
ucaccuugcuagagggccu

SEQ ID NO: 62646 - RNA, 19 nt, Artificial Sequence
  Antisense Oligo
aggcccucuagcaagguga

SEQ ID NO: 62647 - RNA, 19 nt, Artificial Sequence
  Sense Oligo
caccuugcuagagggccua

SEQ ID NO: 62648 - RNA, 19 nt, Artificial Sequence
  Antisense Oligo
uaggcccucuagcaaggug

SEQ ID NO: 62649 - RNA, 19 nt, Artificial Sequence
  Sense Oligo
accuugcuagagggccuaa

SEQ ID NO: 62650 - RNA, 19 nt, Artificial Sequence
  Antisense Oligo
uuaggcccucuagcaaggu

SEQ ID NO: 62651 - RNA, 19 nt, Artificial Sequence
  Sense Oligo
ccuugcuagagggccuaaa

SEQ ID NO: 62652 - RNA, 19 nt, Artificial Sequence
  Antisense Oligo
uuuaggcccucuagcaagg

SEQ ID NO: 62653 - RNA, 19 nt, Artificial Sequence
  Sense Oligo
cuugcuagagggccuaaag

SEQ ID NO: 62654 - RNA, 19 nt, Artificial Sequence
  Antisense Oligo
cuuuaggcccucuagcaag

SEQ ID NO: 62655 - RNA, 19 nt, Artificial Sequence
  Sense Oligo
uugcuagagggccuaaagu

SEQ ID NO: 62656 - RNA, 19 nt, Artificial Sequence
  Antisense Oligo
acuuuaggcccucuagcaa

SEQ ID NO: 62657 - RNA, 19 nt, Artificial Sequence
  Sense Oligo
ugcuagagggccuaaaguc

SEQ ID NO: 62658 - RNA, 19 nt, Artificial Sequence
  Antisense Oligo
gacuuuaggcccucuagca

SEQ ID NO: 62659 - RNA, 19 nt, Artificial Sequence
  Sense Oligo
gcuagagggccuaaaguca

SEQ ID NO: 62660 - RNA, 19 nt, Artificial Sequence
  Antisense Oligo
ugacuuuaggcccucuagc

SEQ ID NO: 62661 - RNA, 19 nt, Artificial Sequence
  Sense Oligo
cuagagggccuaaagucau

SEQ ID NO: 62662 - RNA, 19 nt, Artificial Sequence
  Antisense Oligo
augacuuuaggcccucuag

SEQ ID NO: 62663 - RNA, 19 nt, Artificial Sequence
  Sense Oligo
uagagggccuaaagucaug

SEQ ID NO: 62664 - RNA, 19 nt, Artificial Sequence
  Antisense Oligo
caugacuuuaggcccucua

SEQ ID NO: 62665 - RNA, 19 nt, Artificial Sequence
  Sense Oligo
agagggccuaaagucaugu

SEQ ID NO: 62666 - RNA, 19 nt, Artificial Sequence
  Antisense Oligo
acaugacuuuaggcccucu

SEQ ID NO: 62667 - RNA, 19 nt, Artificial Sequence
  Sense Oligo
gagggccuaaagucaugug

SEQ ID NO: 62668 - RNA, 19 nt, Artificial Sequence
  Antisense Oligo
cacaugacuuuaggcccuc

SEQ ID NO: 62669 - RNA, 19 nt, Artificial Sequence
  Sense Oligo
ccgugggcuucugucgugu

SEQ ID NO: 62670 - RNA, 19 nt, Artificial Sequence
  Antisense Oligo
acacgacagaagcccacgg

SEQ ID NO: 62671 - RNA, 19 nt, Artificial Sequence
  Sense Oligo
cgugggcuucugucguguu

SEQ ID NO: 62672 - RNA, 19 nt, Artificial Sequence
  Antisense Oligo
aacacgacagaagcccacg

SEQ ID NO: 62673 - RNA, 19 nt, Artificial Sequence
  Sense Oligo
gugggcuucugucguguuu

SEQ ID NO: 62674 - RNA, 19 nt, Artificial Sequence
  Antisense Oligo
aaacacgacagaagcccac

SEQ ID NO: 62675 - RNA, 19 nt, Artificial Sequence
  Sense Oligo
ugggcuucugucguguuug

SEQ ID NO: 62676 - RNA, 19 nt, Artificial Sequence
  Antisense Oligo
caaacacgacagaagccca

SEQ ID NO: 62677 - RNA, 19 nt, Artificial Sequence
  Sense Oligo
gggcuucugucguguuugu

SEQ ID NO: 62678 - RNA, 19 nt, Artificial Sequence
  Antisense Oligo
acaaacacgacagaagccc

SEQ ID NO: 62679 - RNA, 19 nt, Artificial Sequence
  Sense Oligo
ggcuucugucguguuugug

SEQ ID NO: 62680 - RNA, 19 nt, Artificial Sequence
  Antisense Oligo
cacaaacacgacagaagcc

SEQ ID NO: 62681 - RNA, 19 nt, Artificial Sequence
  Sense Oligo
gcuucugucguguuugugu

SEQ ID NO: 62682 - RNA, 19 nt, Artificial Sequence
  Antisense Oligo
acacaaacacgacagaagc

SEQ ID NO: 62683 - RNA, 19 nt, Artificial Sequence
  Sense Oligo
cuucugucguguuugugua

SEQ ID NO: 62684 - RNA, 19 nt, Artificial Sequence
  Antisense Oligo
uacacaaacacgacagaag

SEQ ID NO: 62685 - RNA, 19 nt, Artificial Sequence
  Sense Oligo
uucugucguguuuguguac

SEQ ID NO: 62686 - RNA, 19 nt, Artificial Sequence
  Antisense Oligo
guacacaaacacgacagaa

SEQ ID NO: 62687 - RNA, 19 nt, Artificial Sequence
  Sense Oligo
ucugucguguuuguguacu

SEQ ID NO: 62688 - RNA, 19 nt, Artificial Sequence
  Antisense Oligo
aguacacaaacacgacaga

SEQ ID NO: 62689 - RNA, 19 nt, Artificial Sequence
  Sense Oligo
cugucguguuuguguacug

SEQ ID NO: 62690 - RNA, 19 nt, Artificial Sequence
  Antisense Oligo
caguacacaaacacgacag

SEQ ID NO: 62691 - RNA, 19 nt, Artificial Sequence
  Sense Oligo
ugucguguuuguguacugc

SEQ ID NO: 62692 - RNA, 19 nt, Artificial Sequence
  Antisense Oligo
gcaguacacaaacacgaca

SEQ ID NO: 62693 - RNA, 19 nt, Artificial Sequence
  Sense Oligo
gucguguuuguguacugca

SEQ ID NO: 62694 - RNA, 19 nt, Artificial Sequence
  Antisense Oligo
ugcaguacacaaacacgac

SEQ ID NO: 62695 - RNA, 19 nt, Artificial Sequence
  Sense Oligo
ucguguuuguguacugcau

SEQ ID NO: 62696 - RNA, 19 nt, Artificial Sequence
  Antisense Oligo
augcaguacacaaacacga

SEQ ID NO: 62697 - RNA, 19 nt, Artificial Sequence
  Sense Oligo
cguguuuguguacugcaug

SEQ ID NO: 62698 - RNA, 19 nt, Artificial Sequence
  Antisense Oligo
caugcaguacacaaacacg

SEQ ID NO: 62699 - RNA, 19 nt, Artificial Sequence
  Sense Oligo
guguuuguguacugcaugu

SEQ ID NO: 62700 - RNA, 19 nt, Artificial Sequence
  Antisense Oligo
acaugcaguacacaaacac

SEQ ID NO: 62701 - RNA, 19 nt, Artificial Sequence
  Sense Oligo
uguuuguguacugcaugug

SEQ ID NO: 62702 - RNA, 19 nt, Artificial Sequence
  Antisense Oligo
cacaugcaguacacaaaca

SEQ ID NO: 62703 - RNA, 19 nt, Artificial Sequence
  Sense Oligo
guuuguguacugcaugugg

SEQ ID NO: 62704 - RNA, 19 nt, Artificial Sequence
  Antisense Oligo
ccacaugcaguacacaaac

SEQ ID NO: 62705 - RNA, 19 nt, Artificial Sequence
  Sense Oligo
uuuguguacugcauguggg

SEQ ID NO: 62706 - RNA, 19 nt, Artificial Sequence
  Antisense Oligo
cccacaugcaguacacaaa

SEQ ID NO: 62707 - RNA, 19 nt, Artificial Sequence
  Sense Oligo
uguacugcaugugggaagc

SEQ ID NO: 62708 - RNA, 19 nt, Artificial Sequence
  Antisense Oligo
gcuucccacaugcaguaca

SEQ ID NO: 62709 - RNA, 19 nt, Artificial Sequence
  Sense Oligo
guacugcaugugggaagca

SEQ ID NO: 62710 - RNA, 19 nt, Artificial Sequence
  Antisense Oligo
ugcuucccacaugcaguac

SEQ ID NO: 62711 - RNA, 19 nt, Artificial Sequence
  Sense Oligo
augugggaagcagcaguca

SEQ ID NO: 62712 - RNA, 19 nt, Artificial Sequence
  Antisense Oligo
ugacugcugcuucccacau

SEQ ID NO: 62713 - RNA, 19 nt, Artificial Sequence
  Sense Oligo
aagcagcagucaggcacca

SEQ ID NO: 62714 - RNA, 19 nt, Artificial Sequence
  Antisense Oligo
uggugccugacugcugcuu

SEQ ID NO: 62715 - RNA, 19 nt, Artificial Sequence
  Sense Oligo
agcagcagucaggcaccag

SEQ ID NO: 62716 - RNA, 19 nt, Artificial Sequence
  Antisense Oligo
cuggugccugacugcugcu

SEQ ID NO: 62717 - RNA, 19 nt, Artificial Sequence
  Sense Oligo
gcagcagucaggcaccaga

SEQ ID NO: 62718 - RNA, 19 nt, Artificial Sequence
  Antisense Oligo
ucuggugccugacugcugc

SEQ ID NO: 62719 - RNA, 19 nt, Artificial Sequence
  Sense Oligo
aacccaggaugcuaguccc

SEQ ID NO: 62720 - RNA, 19 nt, Artificial Sequence
  Antisense Oligo
gggacuagcauccuggguu

SEQ ID NO: 62721 - RNA, 19 nt, Artificial Sequence
  Sense Oligo
acccaggaugcuaguccca

SEQ ID NO: 62722 - RNA, 19 nt, Artificial Sequence
  Antisense Oligo
ugggacuagcauccugggu

SEQ ID NO: 62723 - RNA, 19 nt, Artificial Sequence
  Sense Oligo
aggaugcuagucccaguuc

SEQ ID NO: 62724 - RNA, 19 nt, Artificial Sequence
  Antisense Oligo
gaacugggacuagcauccu

SEQ ID NO: 62725 - RNA, 19 nt, Artificial Sequence
  Sense Oligo
uagucccaguucaggagcu

SEQ ID NO: 62726 - RNA, 19 nt, Artificial Sequence
  Antisense Oligo
agcuccugaacugggacua

SEQ ID NO: 62727 - RNA, 19 nt, Artificial Sequence
  Sense Oligo
agucccaguucaggagcuc

SEQ ID NO: 62728 - RNA, 19 nt, Artificial Sequence
  Antisense Oligo
gagcuccugaacugggacu

SEQ ID NO: 62729 - RNA, 19 nt, Artificial Sequence
  Sense Oligo
gucccaguucaggagcuca

SEQ ID NO: 62730 - RNA, 19 nt, Artificial Sequence
  Antisense Oligo
ugagcuccugaacugggac

SEQ ID NO: 62731 - RNA, 19 nt, Artificial Sequence
  Sense Oligo
ucccaguucaggagcucag

SEQ ID NO: 62732 - RNA, 19 nt, Artificial Sequence
  Antisense Oligo
cugagcuccugaacuggga

SEQ ID NO: 62733 - RNA, 19 nt, Artificial Sequence
  Sense Oligo
cccaguucaggagcucagg

SEQ ID NO: 62734 - RNA, 19 nt, Artificial Sequence
  Antisense Oligo
ccugagcuccugaacuggg

SEQ ID NO: 62735 - RNA, 19 nt, Artificial Sequence
  Sense Oligo
ccaguucaggagcucaggu

SEQ ID NO: 62736 - RNA, 19 nt, Artificial Sequence
  Antisense Oligo
accugagcuccugaacugg

SEQ ID NO: 62737 - RNA, 19 nt, Artificial Sequence
  Sense Oligo
caguucaggagcucagguc

SEQ ID NO: 62738 - RNA, 19 nt, Artificial Sequence
  Antisense Oligo
gaccugagcuccugaacug

SEQ ID NO: 62739 - RNA, 19 nt, Artificial Sequence
  Sense Oligo
ucaggagcucaggucauug

SEQ ID NO: 62740 - RNA, 19 nt, Artificial Sequence
  Antisense Oligo
caaugaccugagcuccuga

SEQ ID NO: 62741 - RNA, 19 nt, Artificial Sequence
  Sense Oligo
caggagcucaggucauuga

SEQ ID NO: 62742 - RNA, 19 nt, Artificial Sequence
  Antisense Oligo
ucaaugaccugagcuccug

SEQ ID NO: 62743 - RNA, 19 nt, Artificial Sequence
  Sense Oligo
aggagcucaggucauugac

SEQ ID NO: 62744 - RNA, 19 nt, Artificial Sequence
  Antisense Oligo
gucaaugaccugagcuccu

SEQ ID NO: 62745 - RNA, 19 nt, Artificial Sequence
  Sense Oligo
uuuucucgcucugucgccc

SEQ ID NO: 62746 - RNA, 19 nt, Artificial Sequence
  Antisense Oligo
gggcgacagagcgagaaaa

SEQ ID NO: 62747 - RNA, 19 nt, Artificial Sequence
  Sense Oligo
uuucucgcucugucgccca

SEQ ID NO: 62748 - RNA, 19 nt, Artificial Sequence
  Antisense Oligo
ugggcgacagagcgagaaa

SEQ ID NO: 62749 - RNA, 19 nt, Artificial Sequence
  Sense Oligo
uucucgcucugucgcccag

SEQ ID NO: 62750 - RNA, 19 nt, Artificial Sequence
  Antisense Oligo
cugggcgacagagcgagaa

SEQ ID NO: 62751 - RNA, 19 nt, Artificial Sequence
  Sense Oligo
aggcuggagugcaguggug

SEQ ID NO: 62752 - RNA, 19 nt, Artificial Sequence
  Antisense Oligo
caccacugcacuccagccu

SEQ ID NO: 62753 - RNA, 19 nt, Artificial Sequence
  Sense Oligo
gcaguggugcaaucucggc

SEQ ID NO: 62754 - RNA, 19 nt, Artificial Sequence
  Antisense Oligo
gccgagauugcaccacugc

SEQ ID NO: 62755 - RNA, 19 nt, Artificial Sequence
  Sense Oligo
caguggugcaaucucggcu

SEQ ID NO: 62756 - RNA, 19 nt, Artificial Sequence
  Antisense Oligo
agccgagauugcaccacug

SEQ ID NO: 62757 - RNA, 19 nt, Artificial Sequence
  Sense Oligo
aguggugcaaucucggcuc

SEQ ID NO: 62758 - RNA, 19 nt, Artificial Sequence
  Antisense Oligo
gagccgagauugcaccacu

SEQ ID NO: 62759 - RNA, 19 nt, Artificial Sequence
  Sense Oligo
guggugcaaucucggcuca

SEQ ID NO: 62760 - RNA, 19 nt, Artificial Sequence
  Antisense Oligo
ugagccgagauugcaccac

SEQ ID NO: 62761 - RNA, 19 nt, Artificial Sequence
  Sense Oligo
uggugcaaucucggcucac

SEQ ID NO: 62762 - RNA, 19 nt, Artificial Sequence
  Antisense Oligo
gugagccgagauugcacca

SEQ ID NO: 62763 - RNA, 19 nt, Artificial Sequence
  Sense Oligo
ggugcaaucucggcucacu

SEQ ID NO: 62764 - RNA, 19 nt, Artificial Sequence
  Antisense Oligo
agugagccgagauugcacc

SEQ ID NO: 62765 - RNA, 19 nt, Artificial Sequence
  Sense Oligo
gugcaaucucggcucacug

SEQ ID NO: 62766 - RNA, 19 nt, Artificial Sequence
  Antisense Oligo
cagugagccgagauugcac

SEQ ID NO: 62767 - RNA, 19 nt, Artificial Sequence
  Sense Oligo
ugcaaucucggcucacugc

SEQ ID NO: 62768 - RNA, 19 nt, Artificial Sequence
  Antisense Oligo
gcagugagccgagauugca

SEQ ID NO: 62769 - RNA, 19 nt, Artificial Sequence
  Sense Oligo
gcaaucucggcucacugca

SEQ ID NO: 62770 - RNA, 19 nt, Artificial Sequence
  Antisense Oligo
ugcagugagccgagauugc

SEQ ID NO: 62771 - RNA, 19 nt, Artificial Sequence
  Sense Oligo
caaucucggcucacugcaa

SEQ ID NO: 62772 - RNA, 19 nt, Artificial Sequence
  Antisense Oligo
uugcagugagccgagauug

SEQ ID NO: 62773 - RNA, 19 nt, Artificial Sequence
  Sense Oligo
aaucucggcucacugcaag

SEQ ID NO: 62774 - RNA, 19 nt, Artificial Sequence
  Antisense Oligo
cuugcagugagccgagauu

SEQ ID NO: 62775 - RNA, 19 nt, Artificial Sequence
  Sense Oligo
aucucggcucacugcaagc

SEQ ID NO: 62776 - RNA, 19 nt, Artificial Sequence
  Antisense Oligo
gcuugcagugagccgagau

SEQ ID NO: 62777 - RNA, 19 nt, Artificial Sequence
  Sense Oligo
ucucggcucacugcaagcu

SEQ ID NO: 62778 - RNA, 19 nt, Artificial Sequence
  Antisense Oligo
agcuugcagugagccgaga

SEQ ID NO: 62779 - RNA, 19 nt, Artificial Sequence
  Sense Oligo
ggcucacugcaagcuccac

SEQ ID NO: 62780 - RNA, 19 nt, Artificial Sequence
  Antisense Oligo
guggagcuugcagugagcc

SEQ ID NO: 62781 - RNA, 19 nt, Artificial Sequence
  Sense Oligo
gcucacugcaagcuccacc

SEQ ID NO: 62782 - RNA, 19 nt, Artificial Sequence
  Antisense Oligo
gguggagcuugcagugagc

SEQ ID NO: 62783 - RNA, 19 nt, Artificial Sequence
  Sense Oligo
cucacugcaagcuccaccu

SEQ ID NO: 62784 - RNA, 19 nt, Artificial Sequence
  Antisense Oligo
agguggagcuugcagugag

SEQ ID NO: 62785 - RNA, 19 nt, Artificial Sequence
  Sense Oligo
ucacugcaagcuccaccuc

SEQ ID NO: 62786 - RNA, 19 nt, Artificial Sequence
  Antisense Oligo
gagguggagcuugcaguga

SEQ ID NO: 62787 - RNA, 19 nt, Artificial Sequence
  Sense Oligo
aagcuccaccuccuggguu

SEQ ID NO: 62788 - RNA, 19 nt, Artificial Sequence
  Antisense Oligo
aacccaggagguggagcuu

SEQ ID NO: 62789 - RNA, 19 nt, Artificial Sequence
  Sense Oligo
agcuccaccuccuggguuc

SEQ ID NO: 62790 - RNA, 19 nt, Artificial Sequence
  Antisense Oligo
gaacccaggagguggagcu

SEQ ID NO: 62791 - RNA, 19 nt, Artificial Sequence
  Sense Oligo
gcuccaccuccuggguuca

SEQ ID NO: 62792 - RNA, 19 nt, Artificial Sequence
  Antisense Oligo
ugaacccaggagguggagc

SEQ ID NO: 62793 - RNA, 19 nt, Artificial Sequence
  Sense Oligo
cuccaccuccuggguucaa

SEQ ID NO: 62794 - RNA, 19 nt, Artificial Sequence
  Antisense Oligo
uugaacccaggagguggag

SEQ ID NO: 62795 - RNA, 19 nt, Artificial Sequence
  Sense Oligo
uccaccuccuggguucaag

SEQ ID NO: 62796 - RNA, 19 nt, Artificial Sequence
  Antisense Oligo
cuugaacccaggaggugga

SEQ ID NO: 62797 - RNA, 19 nt, Artificial Sequence
  Sense Oligo
ccaccuccuggguucaagu

SEQ ID NO: 62798 - RNA, 19 nt, Artificial Sequence
  Antisense Oligo
acuugaacccaggaggugg

SEQ ID NO: 62799 - RNA, 19 nt, Artificial Sequence
  Sense Oligo
caccuccuggguucaagug

SEQ ID NO: 62800 - RNA, 19 nt, Artificial Sequence
  Antisense Oligo
cacuugaacccaggaggug

SEQ ID NO: 62801 - RNA, 19 nt, Artificial Sequence
  Sense Oligo
accuccuggguucaaguga

SEQ ID NO: 62802 - RNA, 19 nt, Artificial Sequence
  Antisense Oligo
ucacuugaacccaggaggu

SEQ ID NO: 62803 - RNA, 19 nt, Artificial Sequence
  Sense Oligo
uggguucaagugauuuucc

SEQ ID NO: 62804 - RNA, 19 nt, Artificial Sequence
  Antisense Oligo
ggaaaaucacuugaaccca

SEQ ID NO: 62805 - RNA, 19 nt, Artificial Sequence
  Sense Oligo
ugccucagccucccgagua

SEQ ID NO: 62806 - RNA, 19 nt, Artificial Sequence
  Antisense Oligo
uacucgggaggcugaggca

SEQ ID NO: 62807 - RNA, 19 nt, Artificial Sequence
  Sense Oligo
cucagccucccgaguagcu

SEQ ID NO: 62808 - RNA, 19 nt, Artificial Sequence
  Antisense Oligo
agcuacucgggaggcugag

SEQ ID NO: 62809 - RNA, 19 nt, Artificial Sequence
  Sense Oligo
cccgaguagcugggauuac

SEQ ID NO: 62810 - RNA, 19 nt, Artificial Sequence
  Antisense Oligo
guaaucccagcuacucggg

SEQ ID NO: 62811 - RNA, 19 nt, Artificial Sequence
  Sense Oligo
ccgaguagcugggauuaca

SEQ ID NO: 62812 - RNA, 19 nt, Artificial Sequence
  Antisense Oligo
uguaaucccagcuacucgg

SEQ ID NO: 62813 - RNA, 19 nt, Artificial Sequence
  Sense Oligo
cgaguagcugggauuacag

SEQ ID NO: 62814 - RNA, 19 nt, Artificial Sequence
  Antisense Oligo
cuguaaucccagcuacucg

SEQ ID NO: 62815 - RNA, 19 nt, Artificial Sequence
  Sense Oligo
gcugggauuacaggcaccc

SEQ ID NO: 62816 - RNA, 19 nt, Artificial Sequence
  Antisense Oligo
gggugccuguaaucccagc

SEQ ID NO: 62817 - RNA, 19 nt, Artificial Sequence
  Sense Oligo
acaggguuucuccauguug

SEQ ID NO: 62818 - RNA, 19 nt, Artificial Sequence
  Antisense Oligo
caacauggagaaacccugu

SEQ ID NO: 62819 - RNA, 19 nt, Artificial Sequence
  Sense Oligo
caggguuucuccauguugg

SEQ ID NO: 62820 - RNA, 19 nt, Artificial Sequence
  Antisense Oligo
ccaacauggagaaacccug

SEQ ID NO: 62821 - RNA, 19 nt, Artificial Sequence
  Sense Oligo
aggguuucuccauguuggc

SEQ ID NO: 62822 - RNA, 19 nt, Artificial Sequence
  Antisense Oligo
gccaacauggagaaacccu

SEQ ID NO: 62823 - RNA, 19 nt, Artificial Sequence
  Sense Oligo
ggguuucuccauguuggcu

SEQ ID NO: 62824 - RNA, 19 nt, Artificial Sequence
  Antisense Oligo
agccaacauggagaaaccc

SEQ ID NO: 62825 - RNA, 19 nt, Artificial Sequence
  Sense Oligo
gguuucuccauguuggcua

SEQ ID NO: 62826 - RNA, 19 nt, Artificial Sequence
  Antisense Oligo
uagccaacauggagaaacc

SEQ ID NO: 62827 - RNA, 19 nt, Artificial Sequence
  Sense Oligo
guuucuccauguuggcuag

SEQ ID NO: 62828 - RNA, 19 nt, Artificial Sequence
  Antisense Oligo
cuagccaacauggagaaac

SEQ ID NO: 62829 - RNA, 19 nt, Artificial Sequence
  Sense Oligo
uuucuccauguuggcuagg

SEQ ID NO: 62830 - RNA, 19 nt, Artificial Sequence
  Antisense Oligo
ccuagccaacauggagaaa

SEQ ID NO: 62831 - RNA, 19 nt, Artificial Sequence
  Sense Oligo
uggcuaggcuggucucgaa

SEQ ID NO: 62832 - RNA, 19 nt, Artificial Sequence
  Antisense Oligo
uucgagaccagccuagcca

SEQ ID NO: 62833 - RNA, 19 nt, Artificial Sequence
  Sense Oligo
ugacuucaagugauccacc

SEQ ID NO: 62834 - RNA, 19 nt, Artificial Sequence
  Antisense Oligo
gguggaucacuugaaguca

SEQ ID NO: 62835 - RNA, 19 nt, Artificial Sequence
  Sense Oligo
gacuucaagugauccaccu

SEQ ID NO: 62836 - RNA, 19 nt, Artificial Sequence
  Antisense Oligo
agguggaucacuugaaguc

SEQ ID NO: 62837 - RNA, 19 nt, Artificial Sequence
  Sense Oligo
ucaagugauccaccugccu

SEQ ID NO: 62838 - RNA, 19 nt, Artificial Sequence
  Antisense Oligo
aggcagguggaucacuuga

SEQ ID NO: 62839 - RNA, 19 nt, Artificial Sequence
  Sense Oligo
aagugcuaggauuauaggc

SEQ ID NO: 62840 - RNA, 19 nt, Artificial Sequence
  Antisense Oligo
gccuauaauccuagcacuu

SEQ ID NO: 62841 - RNA, 19 nt, Artificial Sequence
  Sense Oligo
agugcuaggauuauaggcg

SEQ ID NO: 62842 - RNA, 19 nt, Artificial Sequence
  Antisense Oligo
cgccuauaauccuagcacu

SEQ ID NO: 62843 - RNA, 19 nt, Artificial Sequence
  Sense Oligo
auuauaggcgugagccacu

SEQ ID NO: 62844 - RNA, 19 nt, Artificial Sequence
  Antisense Oligo
aguggcucacgccuauaau

SEQ ID NO: 62845 - RNA, 19 nt, Artificial Sequence
  Sense Oligo
gccuggccuaggauuuuaa

SEQ ID NO: 62846 - RNA, 19 nt, Artificial Sequence
  Antisense Oligo
uuaaaauccuaggccaggc

SEQ ID NO: 62847 - RNA, 19 nt, Artificial Sequence
  Sense Oligo
ccuggccuaggauuuuaag

SEQ ID NO: 62848 - RNA, 19 nt, Artificial Sequence
  Antisense Oligo
cuuaaaauccuaggccagg

SEQ ID NO: 62849 - RNA, 19 nt, Artificial Sequence
  Sense Oligo
cuggccuaggauuuuaagu

SEQ ID NO: 62850 - RNA, 19 nt, Artificial Sequence
  Antisense Oligo
acuuaaaauccuaggccag

SEQ ID NO: 62851 - RNA, 19 nt, Artificial Sequence
  Sense Oligo
uggccuaggauuuuaaguc

SEQ ID NO: 62852 - RNA, 19 nt, Artificial Sequence
  Antisense Oligo
gacuuaaaauccuaggcca

SEQ ID NO: 62853 - RNA, 19 nt, Artificial Sequence
  Sense Oligo
ggccuaggauuuuaagucu

SEQ ID NO: 62854 - RNA, 19 nt, Artificial Sequence
  Antisense Oligo
agacuuaaaauccuaggcc

SEQ ID NO: 62855 - RNA, 19 nt, Artificial Sequence
  Sense Oligo
gccuaggauuuuaagucuu

SEQ ID NO: 62856 - RNA, 19 nt, Artificial Sequence
  Antisense Oligo
aagacuuaaaauccuaggc

SEQ ID NO: 62857 - RNA, 19 nt, Artificial Sequence
  Sense Oligo
uaagucuuaacgagcauuu

SEQ ID NO: 62858 - RNA, 19 nt, Artificial Sequence
  Antisense Oligo
aaaugcucguuaagacuua

SEQ ID NO: 62859 - RNA, 19 nt, Artificial Sequence
  Sense Oligo
aagucuuaacgagcauuuu

SEQ ID NO: 62860 - RNA, 19 nt, Artificial Sequence
  Antisense Oligo
aaaaugcucguuaagacuu

SEQ ID NO: 62861 - RNA, 19 nt, Artificial Sequence
  Sense Oligo
agucuuaacgagcauuuug

SEQ ID NO: 62862 - RNA, 19 nt, Artificial Sequence
  Antisense Oligo
caaaaugcucguuaagacu

SEQ ID NO: 62863 - RNA, 19 nt, Artificial Sequence
  Sense Oligo
gucuuaacgagcauuuugg

SEQ ID NO: 62864 - RNA, 19 nt, Artificial Sequence
  Antisense Oligo
ccaaaaugcucguuaagac

SEQ ID NO: 62865 - RNA, 19 nt, Artificial Sequence
  Sense Oligo
ucuuaacgagcauuuuggu

SEQ ID NO: 62866 - RNA, 19 nt, Artificial Sequence
  Antisense Oligo
accaaaaugcucguuaaga

SEQ ID NO: 62867 - RNA, 19 nt, Artificial Sequence
  Sense Oligo
cuuaacgagcauuuugguu

SEQ ID NO: 62868 - RNA, 19 nt, Artificial Sequence
  Antisense Oligo
aaccaaaaugcucguuaag

SEQ ID NO: 62869 - RNA, 19 nt, Artificial Sequence
  Sense Oligo
uuaacgagcauuuugguuc

SEQ ID NO: 62870 - RNA, 19 nt, Artificial Sequence
  Antisense Oligo
gaaccaaaaugcucguuaa

SEQ ID NO: 62871 - RNA, 19 nt, Artificial Sequence
  Sense Oligo
uaacgagcauuuugguucu

SEQ ID NO: 62872 - RNA, 19 nt, Artificial Sequence
  Antisense Oligo
agaaccaaaaugcucguua

SEQ ID NO: 62873 - RNA, 19 nt, Artificial Sequence
  Sense Oligo
aacgagcauuuugguucug

SEQ ID NO: 62874 - RNA, 19 nt, Artificial Sequence
  Antisense Oligo
cagaaccaaaaugcucguu

SEQ ID NO: 62875 - RNA, 19 nt, Artificial Sequence
  Sense Oligo
acgagcauuuugguucugc

SEQ ID NO: 62876 - RNA, 19 nt, Artificial Sequence
  Antisense Oligo
gcagaaccaaaaugcucgu

SEQ ID NO: 62877 - RNA, 19 nt, Artificial Sequence
  Sense Oligo
uuuugguucugcugaugac

SEQ ID NO: 62878 - RNA, 19 nt, Artificial Sequence
  Antisense Oligo
gucaucagcagaaccaaaa

SEQ ID NO: 62879 - RNA, 19 nt, Artificial Sequence
  Sense Oligo
uuugguucugcugaugaca

SEQ ID NO: 62880 - RNA, 19 nt, Artificial Sequence
  Antisense Oligo
ugucaucagcagaaccaaa

SEQ ID NO: 62881 - RNA, 19 nt, Artificial Sequence
  Sense Oligo
uuauguuauaugggagccu

SEQ ID NO: 62882 - RNA, 19 nt, Artificial Sequence
  Antisense Oligo
aggcucccauauaacauaa

SEQ ID NO: 62883 - RNA, 19 nt, Artificial Sequence
  Sense Oligo
uauguuauaugggagccuu

SEQ ID NO: 62884 - RNA, 19 nt, Artificial Sequence
  Antisense Oligo
aaggcucccauauaacaua

SEQ ID NO: 62885 - RNA, 19 nt, Artificial Sequence
  Sense Oligo
auguuauaugggagccuuu

SEQ ID NO: 62886 - RNA, 19 nt, Artificial Sequence
  Antisense Oligo
aaaggcucccauauaacau

SEQ ID NO: 62887 - RNA, 19 nt, Artificial Sequence
  Sense Oligo
uguuauaugggagccuuuu

SEQ ID NO: 62888 - RNA, 19 nt, Artificial Sequence
  Antisense Oligo
aaaaggcucccauauaaca

SEQ ID NO: 62889 - RNA, 19 nt, Artificial Sequence
  Sense Oligo
caggaucucacuguggccc

SEQ ID NO: 62890 - RNA, 19 nt, Artificial Sequence
  Antisense Oligo
gggccacagugagauccug

SEQ ID NO: 62891 - RNA, 19 nt, Artificial Sequence
  Sense Oligo
aggaucucacuguggccca

SEQ ID NO: 62892 - RNA, 19 nt, Artificial Sequence
  Antisense Oligo
ugggccacagugagauccu

SEQ ID NO: 62893 - RNA, 19 nt, Artificial Sequence
  Sense Oligo
cagccuccugaguagcuuc

SEQ ID NO: 62894 - RNA, 19 nt, Artificial Sequence
  Antisense Oligo
gaagcuacucaggaggcug

SEQ ID NO: 62895 - RNA, 19 nt, Artificial Sequence
  Sense Oligo
gacaggguuucgccauguu

SEQ ID NO: 62896 - RNA, 19 nt, Artificial Sequence
  Antisense Oligo
aacauggcgaaacccuguc

SEQ ID NO: 62897 - RNA, 19 nt, Artificial Sequence
  Sense Oligo
acaggguuucgccauguug

SEQ ID NO: 62898 - RNA, 19 nt, Artificial Sequence
  Antisense Oligo
caacauggcgaaacccugu

SEQ ID NO: 62899 - RNA, 19 nt, Artificial Sequence
  Sense Oligo
caggguuucgccauguugc

SEQ ID NO: 62900 - RNA, 19 nt, Artificial Sequence
  Antisense Oligo
gcaacauggcgaaacccug

SEQ ID NO: 62901 - RNA, 19 nt, Artificial Sequence
  Sense Oligo
aggguuucgccauguugcc

SEQ ID NO: 62902 - RNA, 19 nt, Artificial Sequence
  Antisense Oligo
ggcaacauggcgaaacccu

SEQ ID NO: 62903 - RNA, 19 nt, Artificial Sequence
  Sense Oligo
ggguuucgccauguugccc

SEQ ID NO: 62904 - RNA, 19 nt, Artificial Sequence
  Antisense Oligo
gggcaacauggcgaaaccc

SEQ ID NO: 62905 - RNA, 19 nt, Artificial Sequence
  Sense Oligo
gguuucgccauguugccca

SEQ ID NO: 62906 - RNA, 19 nt, Artificial Sequence
  Antisense Oligo
ugggcaacauggcgaaacc

SEQ ID NO: 62907 - RNA, 19 nt, Artificial Sequence
  Sense Oligo
guuucgccauguugcccag

SEQ ID NO: 62908 - RNA, 19 nt, Artificial Sequence
  Antisense Oligo
cugggcaacauggcgaaac

SEQ ID NO: 62909 - RNA, 19 nt, Artificial Sequence
  Sense Oligo
uuucgccauguugcccagg

SEQ ID NO: 62910 - RNA, 19 nt, Artificial Sequence
  Antisense Oligo
ccugggcaacauggcgaaa

SEQ ID NO: 62911 - RNA, 19 nt, Artificial Sequence
  Sense Oligo
uucgccauguugcccaggc

SEQ ID NO: 62912 - RNA, 19 nt, Artificial Sequence
  Antisense Oligo
gccugggcaacauggcgaa

SEQ ID NO: 62913 - RNA, 19 nt, Artificial Sequence
  Sense Oligo
ucgccauguugcccaggcu

SEQ ID NO: 62914 - RNA, 19 nt, Artificial Sequence
  Antisense Oligo
agccugggcaacauggcga

SEQ ID NO: 62915 - RNA, 19 nt, Artificial Sequence
  Sense Oligo
ccauguugcccaggcuggu

SEQ ID NO: 62916 - RNA, 19 nt, Artificial Sequence
  Antisense Oligo
accagccugggcaacaugg

SEQ ID NO: 62917 - RNA, 19 nt, Artificial Sequence
  Sense Oligo
cauguugcccaggcugguc

SEQ ID NO: 62918 - RNA, 19 nt, Artificial Sequence
  Antisense Oligo
gaccagccugggcaacaug

SEQ ID NO: 62919 - RNA, 19 nt, Artificial Sequence
  Sense Oligo
auguugcccaggcuggucu

SEQ ID NO: 62920 - RNA, 19 nt, Artificial Sequence
  Antisense Oligo
agaccagccugggcaacau

SEQ ID NO: 62921 - RNA, 19 nt, Artificial Sequence
  Sense Oligo
uguugcccaggcuggucuu

SEQ ID NO: 62922 - RNA, 19 nt, Artificial Sequence
  Antisense Oligo
aagaccagccugggcaaca

SEQ ID NO: 62923 - RNA, 19 nt, Artificial Sequence
  Sense Oligo
guugcccaggcuggucuug

SEQ ID NO: 62924 - RNA, 19 nt, Artificial Sequence
  Antisense Oligo
caagaccagccugggcaac

SEQ ID NO: 62925 - RNA, 19 nt, Artificial Sequence
  Sense Oligo
uugcccaggcuggucuuga

SEQ ID NO: 62926 - RNA, 19 nt, Artificial Sequence
  Antisense Oligo
ucaagaccagccugggcaa

SEQ ID NO: 62927 - RNA, 19 nt, Artificial Sequence
  Sense Oligo
ugcccaggcuggucuugaa

SEQ ID NO: 62928 - RNA, 19 nt, Artificial Sequence
  Antisense Oligo
uucaagaccagccugggca

SEQ ID NO: 62929 - RNA, 19 nt, Artificial Sequence
  Sense Oligo
cugaccuccacugacccac

SEQ ID NO: 62930 - RNA, 19 nt, Artificial Sequence
  Antisense Oligo
gugggucaguggaggucag

SEQ ID NO: 62931 - RNA, 19 nt, Artificial Sequence
  Sense Oligo
cacugacccacccaccuca

SEQ ID NO: 62932 - RNA, 19 nt, Artificial Sequence
  Antisense Oligo
ugaggugggugggucagug

SEQ ID NO: 62933 - RNA, 19 nt, Artificial Sequence
  Sense Oligo
cacacgugagccaccaugc

SEQ ID NO: 62934 - RNA, 19 nt, Artificial Sequence
  Antisense Oligo
gcaugguggcucacgugug

SEQ ID NO: 62935 - RNA, 19 nt, Artificial Sequence
  Sense Oligo
acacgugagccaccaugcu

SEQ ID NO: 62936 - RNA, 19 nt, Artificial Sequence
  Antisense Oligo
agcaugguggcucacgugu

SEQ ID NO: 62937 - RNA, 19 nt, Artificial Sequence
  Sense Oligo
cacgugagccaccaugcug

SEQ ID NO: 62938 - RNA, 19 nt, Artificial Sequence
  Antisense Oligo
cagcaugguggcucacgug

SEQ ID NO: 62939 - RNA, 19 nt, Artificial Sequence
  Sense Oligo
acgugagccaccaugcuga

SEQ ID NO: 62940 - RNA, 19 nt, Artificial Sequence
  Antisense Oligo
ucagcaugguggcucacgu

SEQ ID NO: 62941 - RNA, 19 nt, Artificial Sequence
  Sense Oligo
cgugagccaccaugcugag

SEQ ID NO: 62942 - RNA, 19 nt, Artificial Sequence
  Antisense Oligo
cucagcaugguggcucacg

SEQ ID NO: 62943 - RNA, 19 nt, Artificial Sequence
  Sense Oligo
gugagccaccaugcugagg

SEQ ID NO: 62944 - RNA, 19 nt, Artificial Sequence
  Antisense Oligo
ccucagcaugguggcucac

SEQ ID NO: 62945 - RNA, 19 nt, Artificial Sequence
  Sense Oligo
ugagccaccaugcugagga

SEQ ID NO: 62946 - RNA, 19 nt, Artificial Sequence
  Antisense Oligo
uccucagcaugguggcuca

SEQ ID NO: 62947 - RNA, 19 nt, Artificial Sequence
  Sense Oligo
gagccaccaugcugaggag

SEQ ID NO: 62948 - RNA, 19 nt, Artificial Sequence
  Antisense Oligo
cuccucagcaugguggcuc

SEQ ID NO: 62949 - RNA, 19 nt, Artificial Sequence
  Sense Oligo
agacuguuuuaaaugcucu

SEQ ID NO: 62950 - RNA, 19 nt, Artificial Sequence
  Antisense Oligo
agagcauuuaaaacagucu

SEQ ID NO: 62951 - RNA, 19 nt, Artificial Sequence
  Sense Oligo
aaaugcucucuucuuuggu

SEQ ID NO: 62952 - RNA, 19 nt, Artificial Sequence
  Antisense Oligo
accaaagaagagagcauuu

SEQ ID NO: 62953 - RNA, 19 nt, Artificial Sequence
  Sense Oligo
aaugcucucuucuuugguu

SEQ ID NO: 62954 - RNA, 19 nt, Artificial Sequence
  Antisense Oligo
aaccaaagaagagagcauu

SEQ ID NO: 62955 - RNA, 19 nt, Artificial Sequence
  Sense Oligo
augcucucuucuuugguuu

SEQ ID NO: 62956 - RNA, 19 nt, Artificial Sequence
  Antisense Oligo
aaaccaaagaagagagcau

SEQ ID NO: 62957 - RNA, 19 nt, Artificial Sequence
  Sense Oligo
ugcucucuucuuugguuuu

SEQ ID NO: 62958 - RNA, 19 nt, Artificial Sequence
  Antisense Oligo
aaaaccaaagaagagagca

SEQ ID NO: 62959 - RNA, 19 nt, Artificial Sequence
  Sense Oligo
agacacucucguaaguuac

SEQ ID NO: 62960 - RNA, 19 nt, Artificial Sequence
  Antisense Oligo
guaacuuacgagagugucu

SEQ ID NO: 62961 - RNA, 19 nt, Artificial Sequence
  Sense Oligo
gacacucucguaaguuaca

SEQ ID NO: 62962 - RNA, 19 nt, Artificial Sequence
  Antisense Oligo
uguaacuuacgagaguguc

SEQ ID NO: 62963 - RNA, 19 nt, Artificial Sequence
  Sense Oligo
ucucguaaguuacaugcaa

SEQ ID NO: 62964 - RNA, 19 nt, Artificial Sequence
  Antisense Oligo
uugcauguaacuuacgaga

SEQ ID NO: 62965 - RNA, 19 nt, Artificial Sequence
  Sense Oligo
cucguaaguuacaugcaaa

SEQ ID NO: 62966 - RNA, 19 nt, Artificial Sequence
  Antisense Oligo
uuugcauguaacuuacgag

SEQ ID NO: 62967 - RNA, 19 nt, Artificial Sequence
  Sense Oligo
ccagcugugucucagugug

SEQ ID NO: 62968 - RNA, 19 nt, Artificial Sequence
  Antisense Oligo
cacacugagacacagcugg

SEQ ID NO: 62969 - RNA, 19 nt, Artificial Sequence
  Sense Oligo
cagcugugucucagugugg

SEQ ID NO: 62970 - RNA, 19 nt, Artificial Sequence
  Antisense Oligo
ccacacugagacacagcug

SEQ ID NO: 62971 - RNA, 19 nt, Artificial Sequence
  Sense Oligo
agcugugucucagugugga

SEQ ID NO: 62972 - RNA, 19 nt, Artificial Sequence
  Antisense Oligo
uccacacugagacacagcu

SEQ ID NO: 62973 - RNA, 19 nt, Artificial Sequence
  Sense Oligo
gcugugucucaguguggaa

SEQ ID NO: 62974 - RNA, 19 nt, Artificial Sequence
  Antisense Oligo
uuccacacugagacacagc

SEQ ID NO: 62975 - RNA, 19 nt, Artificial Sequence
  Sense Oligo
uuauuuccucagcuaucuu

SEQ ID NO: 62976 - RNA, 19 nt, Artificial Sequence
  Antisense Oligo
aagauagcugaggaaauaa

SEQ ID NO: 62977 - RNA, 19 nt, Artificial Sequence
  Sense Oligo
uauuuccucagcuaucuuu

SEQ ID NO: 62978 - RNA, 19 nt, Artificial Sequence
  Antisense Oligo
aaagauagcugaggaaaua

SEQ ID NO: 62979 - RNA, 19 nt, Artificial Sequence
  Sense Oligo
auuuccucagcuaucuuug

SEQ ID NO: 62980 - RNA, 19 nt, Artificial Sequence
  Antisense Oligo
caaagauagcugaggaaau

SEQ ID NO: 62981 - RNA, 19 nt, Artificial Sequence
  Sense Oligo
uuuccucagcuaucuuugg

SEQ ID NO: 62982 - RNA, 19 nt, Artificial Sequence
  Antisense Oligo
ccaaagauagcugaggaaa

SEQ ID NO: 62983 - RNA, 19 nt, Artificial Sequence
  Sense Oligo
uuccucagcuaucuuugga

SEQ ID NO: 62984 - RNA, 19 nt, Artificial Sequence
  Antisense Oligo
uccaaagauagcugaggaa

SEQ ID NO: 62985 - RNA, 19 nt, Artificial Sequence
  Sense Oligo
uccucagcuaucuuuggau

SEQ ID NO: 62986 - RNA, 19 nt, Artificial Sequence
  Antisense Oligo
auccaaagauagcugagga

SEQ ID NO: 62987 - RNA, 19 nt, Artificial Sequence
  Sense Oligo
ccucagcuaucuuuggaug

SEQ ID NO: 62988 - RNA, 19 nt, Artificial Sequence
  Antisense Oligo
cauccaaagauagcugagg

SEQ ID NO: 62989 - RNA, 19 nt, Artificial Sequence
  Sense Oligo
cucagcuaucuuuggauga

SEQ ID NO: 62990 - RNA, 19 nt, Artificial Sequence
  Antisense Oligo
ucauccaaagauagcugag

SEQ ID NO: 62991 - RNA, 19 nt, Artificial Sequence
  Sense Oligo
ucagcuaucuuuggaugac

SEQ ID NO: 62992 - RNA, 19 nt, Artificial Sequence
  Antisense Oligo
gucauccaaagauagcuga

SEQ ID NO: 62993 - RNA, 19 nt, Artificial Sequence
  Sense Oligo
cagcuaucuuuggaugacu

SEQ ID NO: 62994 - RNA, 19 nt, Artificial Sequence
  Antisense Oligo
agucauccaaagauagcug

SEQ ID NO: 62995 - RNA, 19 nt, Artificial Sequence
  Sense Oligo
agcuaucuuuggaugacuu

SEQ ID NO: 62996 - RNA, 19 nt, Artificial Sequence
  Antisense Oligo
aagucauccaaagauagcu

SEQ ID NO: 62997 - RNA, 19 nt, Artificial Sequence
  Sense Oligo
gcuaucuuuggaugacuuu

SEQ ID NO: 62998 - RNA, 19 nt, Artificial Sequence
  Antisense Oligo
aaagucauccaaagauagc

SEQ ID NO: 62999 - RNA, 19 nt, Artificial Sequence
  Sense Oligo
cuaucuuuggaugacuuug

SEQ ID NO: 63000 - RNA, 19 nt, Artificial Sequence
  Antisense Oligo
caaagucauccaaagauag

SEQ ID NO: 63001 - RNA, 19 nt, Artificial Sequence
  Sense Oligo
uaucuuuggaugacuuugg

SEQ ID NO: 63002 - RNA, 19 nt, Artificial Sequence
  Antisense Oligo
ccaaagucauccaaagaua

SEQ ID NO: 63003 - RNA, 19 nt, Artificial Sequence
  Sense Oligo
aucuuuggaugacuuugga

SEQ ID NO: 63004 - RNA, 19 nt, Artificial Sequence
  Antisense Oligo
uccaaagucauccaaagau

SEQ ID NO: 63005 - RNA, 19 nt, Artificial Sequence
  Sense Oligo
ucuuuggaugacuuuggag

SEQ ID NO: 63006 - RNA, 19 nt, Artificial Sequence
  Antisense Oligo
cuccaaagucauccaaaga

SEQ ID NO: 63007 - RNA, 19 nt, Artificial Sequence
  Sense Oligo
acuccucucuccucgucug

SEQ ID NO: 63008 - RNA, 19 nt, Artificial Sequence
  Antisense Oligo
cagacgaggagagaggagu

SEQ ID NO: 63009 - RNA, 19 nt, Artificial Sequence
  Sense Oligo
cuccucucuccucgucugc

SEQ ID NO: 63010 - RNA, 19 nt, Artificial Sequence
  Antisense Oligo
gcagacgaggagagaggag

SEQ ID NO: 63011 - RNA, 19 nt, Artificial Sequence
  Sense Oligo
uccucucuccucgucugcg

SEQ ID NO: 63012 - RNA, 19 nt, Artificial Sequence
  Antisense Oligo
cgcagacgaggagagagga

SEQ ID NO: 63013 - RNA, 19 nt, Artificial Sequence
  Sense Oligo
cggcguggacuugaucaug

SEQ ID NO: 63014 - RNA, 19 nt, Artificial Sequence
  Antisense Oligo
caugaucaaguccacgccg

SEQ ID NO: 63015 - RNA, 19 nt, Artificial Sequence
  Sense Oligo
ggcguggacuugaucaugg

SEQ ID NO: 63016 - RNA, 19 nt, Artificial Sequence
  Antisense Oligo
ccaugaucaaguccacgcc

SEQ ID NO: 63017 - RNA, 19 nt, Artificial Sequence
  Sense Oligo
gcguggacuugaucaugga

SEQ ID NO: 63018 - RNA, 19 nt, Artificial Sequence
  Antisense Oligo
uccaugaucaaguccacgc

SEQ ID NO: 63019 - RNA, 19 nt, Artificial Sequence
  Sense Oligo
cguggacuugaucauggac

SEQ ID NO: 63020 - RNA, 19 nt, Artificial Sequence
  Antisense Oligo
guccaugaucaaguccacg

SEQ ID NO: 63021 - RNA, 19 nt, Artificial Sequence
  Sense Oligo
guggacuugaucauggacu

SEQ ID NO: 63022 - RNA, 19 nt, Artificial Sequence
  Antisense Oligo
aguccaugaucaaguccac

SEQ ID NO: 63023 - RNA, 19 nt, Artificial Sequence
  Sense Oligo
acuugaucauggacuggug

SEQ ID NO: 63024 - RNA, 19 nt, Artificial Sequence
  Antisense Oligo
caccaguccaugaucaagu

SEQ ID NO: 63025 - RNA, 19 nt, Artificial Sequence
  Sense Oligo
cauggacuggugccuuugc

SEQ ID NO: 63026 - RNA, 19 nt, Artificial Sequence
  Antisense Oligo
gcaaaggcaccaguccaug

SEQ ID NO: 63027 - RNA, 19 nt, Artificial Sequence
  Sense Oligo
auggacuggugccuuugca

SEQ ID NO: 63028 - RNA, 19 nt, Artificial Sequence
  Antisense Oligo
ugcaaaggcaccaguccau

SEQ ID NO: 63029 - RNA, 19 nt, Artificial Sequence
  Sense Oligo
uggacuggugccuuugcau

SEQ ID NO: 63030 - RNA, 19 nt, Artificial Sequence
  Antisense Oligo
augcaaaggcaccagucca

SEQ ID NO: 63031 - RNA, 19 nt, Artificial Sequence
  Sense Oligo
ggacuggugccuuugcauu

SEQ ID NO: 63032 - RNA, 19 nt, Artificial Sequence
  Antisense Oligo
aaugcaaaggcaccagucc

SEQ ID NO: 63033 - RNA, 19 nt, Artificial Sequence
  Sense Oligo
gacuggugccuuugcauuc

SEQ ID NO: 63034 - RNA, 19 nt, Artificial Sequence
  Antisense Oligo
gaaugcaaaggcaccaguc

SEQ ID NO: 63035 - RNA, 19 nt, Artificial Sequence
  Sense Oligo
cuggugccuuugcauucag

SEQ ID NO: 63036 - RNA, 19 nt, Artificial Sequence
  Antisense Oligo
cugaaugcaaaggcaccag

SEQ ID NO: 63037 - RNA, 19 nt, Artificial Sequence
  Sense Oligo
uggugccuuugcauucaga

SEQ ID NO: 63038 - RNA, 19 nt, Artificial Sequence
  Antisense Oligo
ucugaaugcaaaggcacca

SEQ ID NO: 63039 - RNA, 19 nt, Artificial Sequence
  Sense Oligo
ggugccuuugcauucagaa

SEQ ID NO: 63040 - RNA, 19 nt, Artificial Sequence
  Antisense Oligo
uucugaaugcaaaggcacc

SEQ ID NO: 63041 - RNA, 19 nt, Artificial Sequence
  Sense Oligo
gugccuuugcauucagaag

SEQ ID NO: 63042 - RNA, 19 nt, Artificial Sequence
  Antisense Oligo
cuucugaaugcaaaggcac

SEQ ID NO: 63043 - RNA, 19 nt, Artificial Sequence
  Sense Oligo
agagcugucagcguagcac

SEQ ID NO: 63044 - RNA, 19 nt, Artificial Sequence
  Antisense Oligo
gugcuacgcugacagcucu

SEQ ID NO: 63045 - RNA, 19 nt, Artificial Sequence
  Sense Oligo
cugucagcguagcaccgaa

SEQ ID NO: 63046 - RNA, 19 nt, Artificial Sequence
  Antisense Oligo
uucggugcuacgcugacag

SEQ ID NO: 63047 - RNA, 19 nt, Artificial Sequence
  Sense Oligo
ugucagcguagcaccgaau

SEQ ID NO: 63048 - RNA, 19 nt, Artificial Sequence
  Antisense Oligo
auucggugcuacgcugaca

SEQ ID NO: 63049 - RNA, 19 nt, Artificial Sequence
  Sense Oligo
gucagcguagcaccgaauu

SEQ ID NO: 63050 - RNA, 19 nt, Artificial Sequence
  Antisense Oligo
aauucggugcuacgcugac

SEQ ID NO: 63051 - RNA, 19 nt, Artificial Sequence
  Sense Oligo
ucagcguagcaccgaauuc

SEQ ID NO: 63052 - RNA, 19 nt, Artificial Sequence
  Antisense Oligo
gaauucggugcuacgcuga

SEQ ID NO: 63053 - RNA, 19 nt, Artificial Sequence
  Sense Oligo
cagcguagcaccgaauuca

SEQ ID NO: 63054 - RNA, 19 nt, Artificial Sequence
  Antisense Oligo
ugaauucggugcuacgcug

SEQ ID NO: 63055 - RNA, 19 nt, Artificial Sequence
  Sense Oligo
agcguagcaccgaauucaa

SEQ ID NO: 63056 - RNA, 19 nt, Artificial Sequence
  Antisense Oligo
uugaauucggugcuacgcu

SEQ ID NO: 63057 - RNA, 19 nt, Artificial Sequence
  Sense Oligo
gcguagcaccgaauucaag

SEQ ID NO: 63058 - RNA, 19 nt, Artificial Sequence
  Antisense Oligo
cuugaauucggugcuacgc

SEQ ID NO: 63059 - RNA, 19 nt, Artificial Sequence
  Sense Oligo
cguagcaccgaauucaaga

SEQ ID NO: 63060 - RNA, 19 nt, Artificial Sequence
  Antisense Oligo
ucuugaauucggugcuacg

SEQ ID NO: 63061 - RNA, 19 nt, Artificial Sequence
  Sense Oligo
gaauucaagaccaaggcgu

SEQ ID NO: 63062 - RNA, 19 nt, Artificial Sequence
  Antisense Oligo
acgccuuggucuugaauuc

SEQ ID NO: 63063 - RNA, 19 nt, Artificial Sequence
  Sense Oligo
aauucaagaccaaggcgug

SEQ ID NO: 63064 - RNA, 19 nt, Artificial Sequence
  Antisense Oligo
cacgccuuggucuugaauu

SEQ ID NO: 63065 - RNA, 19 nt, Artificial Sequence
  Sense Oligo
auucaagaccaaggcgugc

SEQ ID NO: 63066 - RNA, 19 nt, Artificial Sequence
  Antisense Oligo
gcacgccuuggucuugaau

SEQ ID NO: 63067 - RNA, 19 nt, Artificial Sequence
  Sense Oligo
uucaagaccaaggcgugcu

SEQ ID NO: 63068 - RNA, 19 nt, Artificial Sequence
  Antisense Oligo
agcacgccuuggucuugaa

SEQ ID NO: 63069 - RNA, 19 nt, Artificial Sequence
  Sense Oligo
ucaagaccaaggcgugcua

SEQ ID NO: 63070 - RNA, 19 nt, Artificial Sequence
  Antisense Oligo
uagcacgccuuggucuuga

SEQ ID NO: 63071 - RNA, 19 nt, Artificial Sequence
  Sense Oligo
caagaccaaggcgugcuac

SEQ ID NO: 63072 - RNA, 19 nt, Artificial Sequence
  Antisense Oligo
guagcacgccuuggucuug

SEQ ID NO: 63073 - RNA, 19 nt, Artificial Sequence
  Sense Oligo
aagaccaaggcgugcuacc

SEQ ID NO: 63074 - RNA, 19 nt, Artificial Sequence
  Antisense Oligo
gguagcacgccuuggucuu

SEQ ID NO: 63075 - RNA, 19 nt, Artificial Sequence
  Sense Oligo
ccaaggcgugcuaccugag

SEQ ID NO: 63076 - RNA, 19 nt, Artificial Sequence
  Antisense Oligo
cucagguagcacgccuugg

SEQ ID NO: 63077 - RNA, 19 nt, Artificial Sequence
  Sense Oligo
caaggcgugcuaccugagc

SEQ ID NO: 63078 - RNA, 19 nt, Artificial Sequence
  Antisense Oligo
gcucagguagcacgccuug

SEQ ID NO: 63079 - RNA, 19 nt, Artificial Sequence
  Sense Oligo
aaggcgugcuaccugagcu

SEQ ID NO: 63080 - RNA, 19 nt, Artificial Sequence
  Antisense Oligo
agcucagguagcacgccuu

SEQ ID NO: 63081 - RNA, 19 nt, Artificial Sequence
  Sense Oligo
aggcgugcuaccugagcug

SEQ ID NO: 63082 - RNA, 19 nt, Artificial Sequence
  Antisense Oligo
cagcucagguagcacgccu

SEQ ID NO: 63083 - RNA, 19 nt, Artificial Sequence
  Sense Oligo
ggcgugcuaccugagcuga

SEQ ID NO: 63084 - RNA, 19 nt, Artificial Sequence
  Antisense Oligo
ucagcucagguagcacgcc

SEQ ID NO: 63085 - RNA, 19 nt, Artificial Sequence
  Sense Oligo
gcgugcuaccugagcugac

SEQ ID NO: 63086 - RNA, 19 nt, Artificial Sequence
  Antisense Oligo
gucagcucagguagcacgc

SEQ ID NO: 63087 - RNA, 19 nt, Artificial Sequence
  Sense Oligo
gugcuaccugagcugacag

SEQ ID NO: 63088 - RNA, 19 nt, Artificial Sequence
  Antisense Oligo
cugucagcucagguagcac

SEQ ID NO: 63089 - RNA, 19 nt, Artificial Sequence
  Sense Oligo
ugcuaccugagcugacagc

SEQ ID NO: 63090 - RNA, 19 nt, Artificial Sequence
  Antisense Oligo
gcugucagcucagguagca

SEQ ID NO: 63091 - RNA, 19 nt, Artificial Sequence
  Sense Oligo
acauuguuuacauuccagg

SEQ ID NO: 63092 - RNA, 19 nt, Artificial Sequence
  Antisense Oligo
ccuggaauguaaacaaugu

SEQ ID NO: 63093 - RNA, 19 nt, Artificial Sequence
  Sense Oligo
cauuguuuacauuccagga

SEQ ID NO: 63094 - RNA, 19 nt, Artificial Sequence
  Antisense Oligo
uccuggaauguaaacaaug

SEQ ID NO: 63095 - RNA, 19 nt, Artificial Sequence
  Sense Oligo
auuguuuacauuccaggag

SEQ ID NO: 63096 - RNA, 19 nt, Artificial Sequence
  Antisense Oligo
cuccuggaauguaaacaau

SEQ ID NO: 63097 - RNA, 19 nt, Artificial Sequence
  Sense Oligo
acuuguagcucagccacac

SEQ ID NO: 63098 - RNA, 19 nt, Artificial Sequence
  Antisense Oligo
guguggcugagcuacaagu

SEQ ID NO: 63099 - RNA, 19 nt, Artificial Sequence
  Sense Oligo
cacgcaguaaugaccugug

SEQ ID NO: 63100 - RNA, 19 nt, Artificial Sequence
  Antisense Oligo
cacaggucauuacugcgug

SEQ ID NO: 63101 - RNA, 19 nt, Artificial Sequence
  Sense Oligo
acgcaguaaugaccugugc

SEQ ID NO: 63102 - RNA, 19 nt, Artificial Sequence
  Antisense Oligo
gcacaggucauuacugcgu

SEQ ID NO: 63103 - RNA, 19 nt, Artificial Sequence
  Sense Oligo
cgcaguaaugaccugugcc

SEQ ID NO: 63104 - RNA, 19 nt, Artificial Sequence
  Antisense Oligo
ggcacaggucauuacugcg

SEQ ID NO: 63105 - RNA, 19 nt, Artificial Sequence
  Sense Oligo
gcaguaaugaccugugccc

SEQ ID NO: 63106 - RNA, 19 nt, Artificial Sequence
  Antisense Oligo
gggcacaggucauuacugc

SEQ ID NO: 63107 - RNA, 19 nt, Artificial Sequence
  Sense Oligo
caguaaugaccugugcccg

SEQ ID NO: 63108 - RNA, 19 nt, Artificial Sequence
  Antisense Oligo
cgggcacaggucauuacug

SEQ ID NO: 63109 - RNA, 19 nt, Artificial Sequence
  Sense Oligo
aguaaugaccugugcccgu

SEQ ID NO: 63110 - RNA, 19 nt, Artificial Sequence
  Antisense Oligo
acgggcacaggucauuacu

SEQ ID NO: 63111 - RNA, 19 nt, Artificial Sequence
  Sense Oligo
guaaugaccugugcccguu

SEQ ID NO: 63112 - RNA, 19 nt, Artificial Sequence
  Antisense Oligo
aacgggcacaggucauuac

SEQ ID NO: 63113 - RNA, 19 nt, Artificial Sequence
  Sense Oligo
uaaugaccugugcccguuc

SEQ ID NO: 63114 - RNA, 19 nt, Artificial Sequence
  Antisense Oligo
gaacgggcacaggucauua

SEQ ID NO: 63115 - RNA, 19 nt, Artificial Sequence
  Sense Oligo
aaugaccugugcccguucg

SEQ ID NO: 63116 - RNA, 19 nt, Artificial Sequence
  Antisense Oligo
cgaacgggcacaggucauu

SEQ ID NO: 63117 - RNA, 19 nt, Artificial Sequence
  Sense Oligo
augaccugugcccguucgc

SEQ ID NO: 63118 - RNA, 19 nt, Artificial Sequence
  Antisense Oligo
gcgaacgggcacaggucau

SEQ ID NO: 63119 - RNA, 19 nt, Artificial Sequence
  Sense Oligo
uucuucuaauucuguacuc

SEQ ID NO: 63120 - RNA, 19 nt, Artificial Sequence
  Antisense Oligo
gaguacagaauuagaagaa

SEQ ID NO: 63121 - RNA, 19 nt, Artificial Sequence
  Sense Oligo
ucuucuaauucuguacuca

SEQ ID NO: 63122 - RNA, 19 nt, Artificial Sequence
  Antisense Oligo
ugaguacagaauuagaaga

SEQ ID NO: 63123 - RNA, 19 nt, Artificial Sequence
  Sense Oligo
uucuaauucuguacucaca

SEQ ID NO: 63124 - RNA, 19 nt, Artificial Sequence
  Antisense Oligo
ugugaguacagaauuagaa

SEQ ID NO: 63125 - RNA, 19 nt, Artificial Sequence
  Sense Oligo
cucauuuucuucuuucuuc

SEQ ID NO: 63126 - RNA, 19 nt, Artificial Sequence
  Antisense Oligo
gaagaaagaagaaaaugag

SEQ ID NO: 63127 - RNA, 19 nt, Artificial Sequence
  Sense Oligo
uuucuucuuucuuccauuc

SEQ ID NO: 63128 - RNA, 19 nt, Artificial Sequence
  Antisense Oligo
gaauggaagaaagaagaaa

SEQ ID NO: 63129 - RNA, 19 nt, Artificial Sequence
  Sense Oligo
ucuuucuuccauucccuua

SEQ ID NO: 63130 - RNA, 19 nt, Artificial Sequence
  Antisense Oligo
uaagggaauggaagaaaga

SEQ ID NO: 63131 - RNA, 19 nt, Artificial Sequence
  Sense Oligo
cuuucuuccauucccuuaa

SEQ ID NO: 63132 - RNA, 19 nt, Artificial Sequence
  Antisense Oligo
uuaagggaauggaagaaag

SEQ ID NO: 63133 - RNA, 19 nt, Artificial Sequence
  Sense Oligo
uuucuuccauucccuuaaa

SEQ ID NO: 63134 - RNA, 19 nt, Artificial Sequence
  Antisense Oligo
uuuaagggaauggaagaaa

SEQ ID NO: 63135 - RNA, 19 nt, Artificial Sequence
  Sense Oligo
uucuuccauucccuuaaau

SEQ ID NO: 63136 - RNA, 19 nt, Artificial Sequence
  Antisense Oligo
auuuaagggaauggaagaa

SEQ ID NO: 63137 - RNA, 19 nt, Artificial Sequence
  Sense Oligo
cuuccauucccuuaaauuc

SEQ ID NO: 63138 - RNA, 19 nt, Artificial Sequence
  Antisense Oligo
gaauuuaagggaauggaag

SEQ ID NO: 63139 - RNA, 19 nt, Artificial Sequence
  Sense Oligo
uccauucccuuaaauucug

SEQ ID NO: 63140 - RNA, 19 nt, Artificial Sequence
  Antisense Oligo
cagaauuuaagggaaugga

SEQ ID NO: 63141 - RNA, 19 nt, Artificial Sequence
  Sense Oligo
cccuuaaauucugaguacu

SEQ ID NO: 63142 - RNA, 19 nt, Artificial Sequence
  Antisense Oligo
aguacucagaauuuaaggg

SEQ ID NO: 63143 - RNA, 19 nt, Artificial Sequence
  Sense Oligo
ccuuaaauucugaguacug

SEQ ID NO: 63144 - RNA, 19 nt, Artificial Sequence
  Antisense Oligo
caguacucagaauuuaagg

SEQ ID NO: 63145 - RNA, 19 nt, Artificial Sequence
  Sense Oligo
uucugaguacuguacauau

SEQ ID NO: 63146 - RNA, 19 nt, Artificial Sequence
  Antisense Oligo
auauguacaguacucagaa

SEQ ID NO: 63147 - RNA, 19 nt, Artificial Sequence
  Sense Oligo
ucugaguacuguacauaua

SEQ ID NO: 63148 - RNA, 19 nt, Artificial Sequence
  Antisense Oligo
uauauguacaguacucaga

SEQ ID NO: 63149 - RNA, 19 nt, Artificial Sequence
  Sense Oligo
cugaguacuguacauauau

SEQ ID NO: 63150 - RNA, 19 nt, Artificial Sequence
  Antisense Oligo
auauauguacaguacucag

SEQ ID NO: 63151 - RNA, 19 nt, Artificial Sequence
  Sense Oligo
acauauauuucuggguucc

SEQ ID NO: 63152 - RNA, 19 nt, Artificial Sequence
  Antisense Oligo
ggaacccagaaauauaugu

SEQ ID NO: 63153 - RNA, 19 nt, Artificial Sequence
  Sense Oligo
uucuggguucccacgauga

SEQ ID NO: 63154 - RNA, 19 nt, Artificial Sequence
  Antisense Oligo
ucaucgugggaacccagaa

SEQ ID NO: 63155 - RNA, 19 nt, Artificial Sequence
  Sense Oligo
ucuggguucccacgaugau

SEQ ID NO: 63156 - RNA, 19 nt, Artificial Sequence
  Antisense Oligo
aucaucgugggaacccaga

SEQ ID NO: 63157 - RNA, 19 nt, Artificial Sequence
  Sense Oligo
cuggguucccacgaugaug

SEQ ID NO: 63158 - RNA, 19 nt, Artificial Sequence
  Antisense Oligo
caucaucgugggaacccag

SEQ ID NO: 63159 - RNA, 19 nt, Artificial Sequence
  Sense Oligo
uggguucccacgaugaugu

SEQ ID NO: 63160 - RNA, 19 nt, Artificial Sequence
  Antisense Oligo
acaucaucgugggaaccca

SEQ ID NO: 63161 - RNA, 19 nt, Artificial Sequence
  Sense Oligo
ggguucccacgaugaugug

SEQ ID NO: 63162 - RNA, 19 nt, Artificial Sequence
  Antisense Oligo
cacaucaucgugggaaccc

SEQ ID NO: 63163 - RNA, 19 nt, Artificial Sequence
  Sense Oligo
auuuugugagugccuuaag

SEQ ID NO: 63164 - RNA, 19 nt, Artificial Sequence
  Antisense Oligo
cuuaaggcacucacaaaau

SEQ ID NO: 63165 - RNA, 19 nt, Artificial Sequence
  Sense Oligo
gugagugccuuaagaucaa

SEQ ID NO: 63166 - RNA, 19 nt, Artificial Sequence
  Antisense Oligo
uugaucuuaaggcacucac

SEQ ID NO: 63167 - RNA, 19 nt, Artificial Sequence
  Sense Oligo
ugagugccuuaagaucaaa

SEQ ID NO: 63168 - RNA, 19 nt, Artificial Sequence
  Antisense Oligo
uuugaucuuaaggcacuca

SEQ ID NO: 63169 - RNA, 19 nt, Artificial Sequence
  Sense Oligo
cccacuucagaggguaaga

SEQ ID NO: 63170 - RNA, 19 nt, Artificial Sequence
  Antisense Oligo
ucuuacccucugaaguggg

SEQ ID NO: 63171 - RNA, 19 nt, Artificial Sequence
  Sense Oligo
ccacuucagaggguaagag

SEQ ID NO: 63172 - RNA, 19 nt, Artificial Sequence
  Antisense Oligo
cucuuacccucugaagugg

SEQ ID NO: 63173 - RNA, 19 nt, Artificial Sequence
  Sense Oligo
cacuucagaggguaagagc

SEQ ID NO: 63174 - RNA, 19 nt, Artificial Sequence
  Antisense Oligo
gcucuuacccucugaagug

SEQ ID NO: 63175 - RNA, 19 nt, Artificial Sequence
  Sense Oligo
cagaggguaagagccaaaa

SEQ ID NO: 63176 - RNA, 19 nt, Artificial Sequence
  Antisense Oligo
uuuuggcucuuacccucug

SEQ ID NO: 63177 - RNA, 19 nt, Artificial Sequence
  Sense Oligo
agaggguaagagccaaaag

SEQ ID NO: 63178 - RNA, 19 nt, Artificial Sequence
  Antisense Oligo
cuuuuggcucuuacccucu

SEQ ID NO: 63179 - RNA, 19 nt, Artificial Sequence
  Sense Oligo
gaggguaagagccaaaagc

SEQ ID NO: 63180 - RNA, 19 nt, Artificial Sequence
  Antisense Oligo
gcuuuuggcucuuacccuc

SEQ ID NO: 63181 - RNA, 19 nt, Artificial Sequence
  Sense Oligo
aggguaagagccaaaagcc

SEQ ID NO: 63182 - RNA, 19 nt, Artificial Sequence
  Antisense Oligo
ggcuuuuggcucuuacccu

SEQ ID NO: 63183 - RNA, 19 nt, Artificial Sequence
  Sense Oligo
ggguaagagccaaaagccu

SEQ ID NO: 63184 - RNA, 19 nt, Artificial Sequence
  Antisense Oligo
aggcuuuuggcucuuaccc

SEQ ID NO: 63185 - RNA, 19 nt, Artificial Sequence
  Sense Oligo
aagagccaaaagccucauu

SEQ ID NO: 63186 - RNA, 19 nt, Artificial Sequence
  Antisense Oligo
aaugaggcuuuuggcucuu

SEQ ID NO: 63187 - RNA, 19 nt, Artificial Sequence
  Sense Oligo
agagccaaaagccucauug

SEQ ID NO: 63188 - RNA, 19 nt, Artificial Sequence
  Antisense Oligo
caaugaggcuuuuggcucu

SEQ ID NO: 63189 - RNA, 19 nt, Artificial Sequence
  Sense Oligo
gagccaaaagccucauugu

SEQ ID NO: 63190 - RNA, 19 nt, Artificial Sequence
  Antisense Oligo
acaaugaggcuuuuggcuc

SEQ ID NO: 63191 - RNA, 19 nt, Artificial Sequence
  Sense Oligo
agccaaaagccucauugug

SEQ ID NO: 63192 - RNA, 19 nt, Artificial Sequence
  Antisense Oligo
cacaaugaggcuuuuggcu

SEQ ID NO: 63193 - RNA, 19 nt, Artificial Sequence
  Sense Oligo
aaaggcacuggacuuggac

SEQ ID NO: 63194 - RNA, 19 nt, Artificial Sequence
  Antisense Oligo
guccaaguccagugccuuu

SEQ ID NO: 63195 - RNA, 19 nt, Artificial Sequence
  Sense Oligo
aaggcacuggacuuggacc

SEQ ID NO: 63196 - RNA, 19 nt, Artificial Sequence
  Antisense Oligo
gguccaaguccagugccuu

SEQ ID NO: 63197 - RNA, 19 nt, Artificial Sequence
  Sense Oligo
aggcacuggacuuggacca

SEQ ID NO: 63198 - RNA, 19 nt, Artificial Sequence
  Antisense Oligo
ugguccaaguccagugccu

SEQ ID NO: 63199 - RNA, 19 nt, Artificial Sequence
  Sense Oligo
uggacuuggaccagggaca

SEQ ID NO: 63200 - RNA, 19 nt, Artificial Sequence
  Antisense Oligo
ugucccugguccaagucca

SEQ ID NO: 63201 - RNA, 19 nt, Artificial Sequence
  Sense Oligo
ggacuuggaccagggacac

SEQ ID NO: 63202 - RNA, 19 nt, Artificial Sequence
  Antisense Oligo
gugucccugguccaagucc

SEQ ID NO: 63203 - RNA, 19 nt, Artificial Sequence
  Sense Oligo
gacuuggaccagggacacc

SEQ ID NO: 63204 - RNA, 19 nt, Artificial Sequence
  Antisense Oligo
ggugucccugguccaaguc

SEQ ID NO: 63205 - RNA, 19 nt, Artificial Sequence
  Sense Oligo
acuuggaccagggacacca

SEQ ID NO: 63206 - RNA, 19 nt, Artificial Sequence
  Antisense Oligo
uggugucccugguccaagu

SEQ ID NO: 63207 - RNA, 19 nt, Artificial Sequence
  Sense Oligo
cuuggaccagggacaccau

SEQ ID NO: 63208 - RNA, 19 nt, Artificial Sequence
  Antisense Oligo
auggugucccugguccaag

SEQ ID NO: 63209 - RNA, 19 nt, Artificial Sequence
  Sense Oligo
uuggaccagggacaccauc

SEQ ID NO: 63210 - RNA, 19 nt, Artificial Sequence
  Antisense Oligo
gauggugucccugguccaa

SEQ ID NO: 63211 - RNA, 19 nt, Artificial Sequence
  Sense Oligo
uggaccagggacaccauca

SEQ ID NO: 63212 - RNA, 19 nt, Artificial Sequence
  Antisense Oligo
ugauggugucccuggucca

SEQ ID NO: 63213 - RNA, 19 nt, Artificial Sequence
  Sense Oligo
gggacaccaucagggccuu

SEQ ID NO: 63214 - RNA, 19 nt, Artificial Sequence
  Antisense Oligo
aaggcccugaugguguccc

SEQ ID NO: 63215 - RNA, 19 nt, Artificial Sequence
  Sense Oligo
ggacaccaucagggccuug

SEQ ID NO: 63216 - RNA, 19 nt, Artificial Sequence
  Antisense Oligo
caaggcccugauggugucc

SEQ ID NO: 63217 - RNA, 19 nt, Artificial Sequence
  Sense Oligo
agaguggauuaaucgccaa

SEQ ID NO: 63218 - RNA, 19 nt, Artificial Sequence
  Antisense Oligo
uuggcgauuaauccacucu

SEQ ID NO: 63219 - RNA, 19 nt, Artificial Sequence
  Sense Oligo
gaguggauuaaucgccaaa

SEQ ID NO: 63220 - RNA, 19 nt, Artificial Sequence
  Antisense Oligo
uuuggcgauuaauccacuc

SEQ ID NO: 63221 - RNA, 19 nt, Artificial Sequence
  Sense Oligo
aucgccaaagauucuucug

SEQ ID NO: 63222 - RNA, 19 nt, Artificial Sequence
  Antisense Oligo
cagaagaaucuuuggcgau

SEQ ID NO: 63223 - RNA, 19 nt, Artificial Sequence
  Sense Oligo
gauucuucugaucugacau

SEQ ID NO: 63224 - RNA, 19 nt, Artificial Sequence
  Antisense Oligo
augucagaucagaagaauc

SEQ ID NO: 63225 - RNA, 19 nt, Artificial Sequence
  Sense Oligo
ucuucugaucugacauuuu

SEQ ID NO: 63226 - RNA, 19 nt, Artificial Sequence
  Antisense Oligo
aaaaugucagaucagaaga

SEQ ID NO: 63227 - RNA, 19 nt, Artificial Sequence
  Sense Oligo
cuucugaucugacauuuug

SEQ ID NO: 63228 - RNA, 19 nt, Artificial Sequence
  Antisense Oligo
caaaaugucagaucagaag

SEQ ID NO: 63229 - RNA, 19 nt, Artificial Sequence
  Sense Oligo
uucugaucugacauuuuga

SEQ ID NO: 63230 - RNA, 19 nt, Artificial Sequence
  Antisense Oligo
ucaaaaugucagaucagaa

SEQ ID NO: 63231 - RNA, 19 nt, Artificial Sequence
  Sense Oligo
ucugaucugacauuuugaa

SEQ ID NO: 63232 - RNA, 19 nt, Artificial Sequence
  Antisense Oligo
uucaaaaugucagaucaga

SEQ ID NO: 63233 - RNA, 19 nt, Artificial Sequence
  Sense Oligo
cuuggucacaggccugguu

SEQ ID NO: 63234 - RNA, 19 nt, Artificial Sequence
  Antisense Oligo
aaccaggccugugaccaag

SEQ ID NO: 63235 - RNA, 19 nt, Artificial Sequence
  Sense Oligo
uuggucacaggccugguuc

SEQ ID NO: 63236 - RNA, 19 nt, Artificial Sequence
  Antisense Oligo
gaaccaggccugugaccaa

SEQ ID NO: 63237 - RNA, 19 nt, Artificial Sequence
  Sense Oligo
uggucacaggccugguucu

SEQ ID NO: 63238 - RNA, 19 nt, Artificial Sequence
  Antisense Oligo
agaaccaggccugugacca

SEQ ID NO: 63239 - RNA, 19 nt, Artificial Sequence
  Sense Oligo
ggucacaggccugguucug

SEQ ID NO: 63240 - RNA, 19 nt, Artificial Sequence
  Antisense Oligo
cagaaccaggccugugacc

SEQ ID NO: 63241 - RNA, 19 nt, Artificial Sequence
  Sense Oligo
gucacaggccugguucugg

SEQ ID NO: 63242 - RNA, 19 nt, Artificial Sequence
  Antisense Oligo
ccagaaccaggccugugac

SEQ ID NO: 63243 - RNA, 19 nt, Artificial Sequence
  Sense Oligo
ucacaggccugguucuggc

SEQ ID NO: 63244 - RNA, 19 nt, Artificial Sequence
  Antisense Oligo
gccagaaccaggccuguga

SEQ ID NO: 63245 - RNA, 19 nt, Artificial Sequence
  Sense Oligo
cacaggccugguucuggca

SEQ ID NO: 63246 - RNA, 19 nt, Artificial Sequence
  Antisense Oligo
ugccagaaccaggccugug

SEQ ID NO: 63247 - RNA, 19 nt, Artificial Sequence
  Sense Oligo
acaggccugguucuggcag

SEQ ID NO: 63248 - RNA, 19 nt, Artificial Sequence
  Antisense Oligo
cugccagaaccaggccugu

SEQ ID NO: 63249 - RNA, 19 nt, Artificial Sequence
  Sense Oligo
caggccugguucuggcagu

SEQ ID NO: 63250 - RNA, 19 nt, Artificial Sequence
  Antisense Oligo
acugccagaaccaggccug

SEQ ID NO: 63251 - RNA, 19 nt, Artificial Sequence
  Sense Oligo
aggccugguucuggcaguu

SEQ ID NO: 63252 - RNA, 19 nt, Artificial Sequence
  Antisense Oligo
aacugccagaaccaggccu

SEQ ID NO: 63253 - RNA, 19 nt, Artificial Sequence
  Sense Oligo
ggccugguucuggcaguuc

SEQ ID NO: 63254 - RNA, 19 nt, Artificial Sequence
  Antisense Oligo
gaacugccagaaccaggcc

SEQ ID NO: 63255 - RNA, 19 nt, Artificial Sequence
  Sense Oligo
gccugguucuggcaguucu

SEQ ID NO: 63256 - RNA, 19 nt, Artificial Sequence
  Antisense Oligo
agaacugccagaaccaggc

SEQ ID NO: 63257 - RNA, 19 nt, Artificial Sequence
  Sense Oligo
ccugguucuggcaguucuu

SEQ ID NO: 63258 - RNA, 19 nt, Artificial Sequence
  Antisense Oligo
aagaacugccagaaccagg

SEQ ID NO: 63259 - RNA, 19 nt, Artificial Sequence
  Sense Oligo
guucuggcaguucuuugcg

SEQ ID NO: 63260 - RNA, 19 nt, Artificial Sequence
  Antisense Oligo
cgcaaagaacugccagaac

SEQ ID NO: 63261 - RNA, 19 nt, Artificial Sequence
  Sense Oligo
uucuggcaguucuuugcgg

SEQ ID NO: 63262 - RNA, 19 nt, Artificial Sequence
  Antisense Oligo
ccgcaaagaacugccagaa

SEQ ID NO: 63263 - RNA, 19 nt, Artificial Sequence
  Sense Oligo
ucuggcaguucuuugcgga

SEQ ID NO: 63264 - RNA, 19 nt, Artificial Sequence
  Antisense Oligo
uccgcaaagaacugccaga

SEQ ID NO: 63265 - RNA, 19 nt, Artificial Sequence
  Sense Oligo
cuggcaguucuuugcggac

SEQ ID NO: 63266 - RNA, 19 nt, Artificial Sequence
  Antisense Oligo
guccgcaaagaacugccag

SEQ ID NO: 63267 - RNA, 19 nt, Artificial Sequence
  Sense Oligo
uggcaguucuuugcggacu

SEQ ID NO: 63268 - RNA, 19 nt, Artificial Sequence
  Antisense Oligo
aguccgcaaagaacugcca

SEQ ID NO: 63269 - RNA, 19 nt, Artificial Sequence
  Sense Oligo
ggcaguucuuugcggacuu

SEQ ID NO: 63270 - RNA, 19 nt, Artificial Sequence
  Antisense Oligo
aaguccgcaaagaacugcc

SEQ ID NO: 63271 - RNA, 19 nt, Artificial Sequence
  Sense Oligo
gcaguucuuugcggacuuu

SEQ ID NO: 63272 - RNA, 19 nt, Artificial Sequence
  Antisense Oligo
aaaguccgcaaagaacugc

SEQ ID NO: 63273 - RNA, 19 nt, Artificial Sequence
  Sense Oligo
caguucuuugcggacuuuu

SEQ ID NO: 63274 - RNA, 19 nt, Artificial Sequence
  Antisense Oligo
aaaaguccgcaaagaacug

SEQ ID NO: 63275 - RNA, 19 nt, Artificial Sequence
  Sense Oligo
ucuagcauuaugccaaaua

SEQ ID NO: 63276 - RNA, 19 nt, Artificial Sequence
  Antisense Oligo
uauuuggcauaaugcuaga

SEQ ID NO: 63277 - RNA, 19 nt, Artificial Sequence
  Sense Oligo
acaugcagucucagugugc

SEQ ID NO: 63278 - RNA, 19 nt, Artificial Sequence
  Antisense Oligo
gcacacugagacugcaugu

SEQ ID NO: 63279 - RNA, 19 nt, Artificial Sequence
  Sense Oligo
caugcagucucagugugcu

SEQ ID NO: 63280 - RNA, 19 nt, Artificial Sequence
  Antisense Oligo
agcacacugagacugcaug

SEQ ID NO: 63281 - RNA, 19 nt, Artificial Sequence
  Sense Oligo
cagucucagugugcucucg

SEQ ID NO: 63282 - RNA, 19 nt, Artificial Sequence
  Antisense Oligo
cgagagcacacugagacug

SEQ ID NO: 63283 - RNA, 19 nt, Artificial Sequence
  Sense Oligo
agucucagugugcucucgc

SEQ ID NO: 63284 - RNA, 19 nt, Artificial Sequence
  Antisense Oligo
gcgagagcacacugagacu

SEQ ID NO: 63285 - RNA, 19 nt, Artificial Sequence
  Sense Oligo
gucucagugugcucucgca

SEQ ID NO: 63286 - RNA, 19 nt, Artificial Sequence
  Antisense Oligo
ugcgagagcacacugagac

SEQ ID NO: 63287 - RNA, 19 nt, Artificial Sequence
  Sense Oligo
ucucagugugcucucgcau

SEQ ID NO: 63288 - RNA, 19 nt, Artificial Sequence
  Antisense Oligo
augcgagagcacacugaga

SEQ ID NO: 63289 - RNA, 19 nt, Artificial Sequence
  Sense Oligo
cucagugugcucucgcaug

SEQ ID NO: 63290 - RNA, 19 nt, Artificial Sequence
  Antisense Oligo
caugcgagagcacacugag

SEQ ID NO: 63291 - RNA, 19 nt, Artificial Sequence
  Sense Oligo
cagugugcucucgcaugua

SEQ ID NO: 63292 - RNA, 19 nt, Artificial Sequence
  Antisense Oligo
uacaugcgagagcacacug

SEQ ID NO: 63293 - RNA, 19 nt, Artificial Sequence
  Sense Oligo
agugugcucucgcauguau

SEQ ID NO: 63294 - RNA, 19 nt, Artificial Sequence
  Antisense Oligo
auacaugcgagagcacacu

SEQ ID NO: 63295 - RNA, 19 nt, Artificial Sequence
  Sense Oligo
gugugcucucgcauguaug

SEQ ID NO: 63296 - RNA, 19 nt, Artificial Sequence
  Antisense Oligo
cauacaugcgagagcacac

SEQ ID NO: 63297 - RNA, 19 nt, Artificial Sequence
  Sense Oligo
ugugcucucgcauguauga

SEQ ID NO: 63298 - RNA, 19 nt, Artificial Sequence
  Antisense Oligo
ucauacaugcgagagcaca

SEQ ID NO: 63299 - RNA, 19 nt, Artificial Sequence
  Sense Oligo
gugcucucgcauguaugaa

SEQ ID NO: 63300 - RNA, 19 nt, Artificial Sequence
  Antisense Oligo
uucauacaugcgagagcac

SEQ ID NO: 63301 - RNA, 19 nt, Artificial Sequence
  Sense Oligo
ucucgcauguaugaauauc

SEQ ID NO: 63302 - RNA, 19 nt, Artificial Sequence
  Antisense Oligo
gauauucauacaugcgaga

SEQ ID NO: 63303 - RNA, 19 nt, Artificial Sequence
  Sense Oligo
cucgcauguaugaauaucu

SEQ ID NO: 63304 - RNA, 19 nt, Artificial Sequence
  Antisense Oligo
agauauucauacaugcgag

SEQ ID NO: 63305 - RNA, 19 nt, Artificial Sequence
  Sense Oligo
ucgcauguaugaauaucua

SEQ ID NO: 63306 - RNA, 19 nt, Artificial Sequence
  Antisense Oligo
uagauauucauacaugcga

SEQ ID NO: 63307 - RNA, 19 nt, Artificial Sequence
  Sense Oligo
cgcauguaugaauaucuag

SEQ ID NO: 63308 - RNA, 19 nt, Artificial Sequence
  Antisense Oligo
cuagauauucauacaugcg

SEQ ID NO: 63309 - RNA, 19 nt, Artificial Sequence
  Sense Oligo
uguaugaauaucuaguccu

SEQ ID NO: 63310 - RNA, 19 nt, Artificial Sequence
  Antisense Oligo
aggacuagauauucauaca

SEQ ID NO: 63311 - RNA, 19 nt, Artificial Sequence
  Sense Oligo
aauaucuaguccuuucugu

SEQ ID NO: 63312 - RNA, 19 nt, Artificial Sequence
  Antisense Oligo
acagaaaggacuagauauu

SEQ ID NO: 63313 - RNA, 19 nt, Artificial Sequence
  Sense Oligo
auaucuaguccuuucugug

SEQ ID NO: 63314 - RNA, 19 nt, Artificial Sequence
  Antisense Oligo
cacagaaaggacuagauau

SEQ ID NO: 63315 - RNA, 19 nt, Artificial Sequence
  Sense Oligo
uaucuaguccuuucugugg

SEQ ID NO: 63316 - RNA, 19 nt, Artificial Sequence
  Antisense Oligo
ccacagaaaggacuagaua

SEQ ID NO: 63317 - RNA, 19 nt, Artificial Sequence
  Sense Oligo
uucucagccaagacauaaa

SEQ ID NO: 63318 - RNA, 19 nt, Artificial Sequence
  Antisense Oligo
uuuaugucuuggcugagaa

SEQ ID NO: 63319 - RNA, 19 nt, Artificial Sequence
  Sense Oligo
ucucagccaagacauaaaa

SEQ ID NO: 63320 - RNA, 19 nt, Artificial Sequence
  Antisense Oligo
uuuuaugucuuggcugaga

SEQ ID NO: 63321 - RNA, 19 nt, Artificial Sequence
  Sense Oligo
cggaucuugugcugcuuuu

SEQ ID NO: 63322 - RNA, 19 nt, Artificial Sequence
  Antisense Oligo
aaaagcagcacaagauccg

SEQ ID NO: 63323 - RNA, 19 nt, Artificial Sequence
  Sense Oligo
uugugcugcuuuucucacu

SEQ ID NO: 63324 - RNA, 19 nt, Artificial Sequence
  Antisense Oligo
agugagaaaagcagcacaa

SEQ ID NO: 63325 - RNA, 19 nt, Artificial Sequence
  Sense Oligo
gugcugcuuuucucacuga

SEQ ID NO: 63326 - RNA, 19 nt, Artificial Sequence
  Antisense Oligo
ucagugagaaaagcagcac

SEQ ID NO: 63327 - RNA, 19 nt, Artificial Sequence
  Sense Oligo
cuuuucucacugacguguu

SEQ ID NO: 63328 - RNA, 19 nt, Artificial Sequence
  Antisense Oligo
aacacgucagugagaaaag

SEQ ID NO: 63329 - RNA, 19 nt, Artificial Sequence
  Sense Oligo
uuuucucacugacguguug

SEQ ID NO: 63330 - RNA, 19 nt, Artificial Sequence
  Antisense Oligo
caacacgucagugagaaaa

SEQ ID NO: 63331 - RNA, 19 nt, Artificial Sequence
  Sense Oligo
uuucucacugacguguugc

SEQ ID NO: 63332 - RNA, 19 nt, Artificial Sequence
  Antisense Oligo
gcaacacgucagugagaaa

SEQ ID NO: 63333 - RNA, 19 nt, Artificial Sequence
  Sense Oligo
uucucacugacguguugcc

SEQ ID NO: 63334 - RNA, 19 nt, Artificial Sequence
  Antisense Oligo
ggcaacacgucagugagaa

SEQ ID NO: 63335 - RNA, 19 nt, Artificial Sequence
  Sense Oligo
ucucacugacguguugccu

SEQ ID NO: 63336 - RNA, 19 nt, Artificial Sequence
  Antisense Oligo
aggcaacacgucagugaga

SEQ ID NO: 63337 - RNA, 19 nt, Artificial Sequence
  Sense Oligo
aaucugcuuugauacuuag

SEQ ID NO: 63338 - RNA, 19 nt, Artificial Sequence
  Antisense Oligo
cuaaguaucaaagcagauu

SEQ ID NO: 63339 - RNA, 19 nt, Artificial Sequence
  Sense Oligo
aucugcuuugauacuuagg

SEQ ID NO: 63340 - RNA, 19 nt, Artificial Sequence
  Antisense Oligo
ccuaaguaucaaagcagau

SEQ ID NO: 63341 - RNA, 19 nt, Artificial Sequence
  Sense Oligo
ucugcuuugauacuuagga

SEQ ID NO: 63342 - RNA, 19 nt, Artificial Sequence
  Antisense Oligo
uccuaaguaucaaagcaga

SEQ ID NO: 63343 - RNA, 19 nt, Artificial Sequence
  Sense Oligo
cugcuuugauacuuaggac

SEQ ID NO: 63344 - RNA, 19 nt, Artificial Sequence
  Antisense Oligo
guccuaaguaucaaagcag

SEQ ID NO: 63345 - RNA, 19 nt, Artificial Sequence
  Sense Oligo
ugcuuugauacuuaggacc

SEQ ID NO: 63346 - RNA, 19 nt, Artificial Sequence
  Antisense Oligo
gguccuaaguaucaaagca

SEQ ID NO: 63347 - RNA, 19 nt, Artificial Sequence
  Sense Oligo
gcuuugauacuuaggaccu

SEQ ID NO: 63348 - RNA, 19 nt, Artificial Sequence
  Antisense Oligo
agguccuaaguaucaaagc

SEQ ID NO: 63349 - RNA, 19 nt, Artificial Sequence
  Sense Oligo
cuuugauacuuaggaccuc

SEQ ID NO: 63350 - RNA, 19 nt, Artificial Sequence
  Antisense Oligo
gagguccuaaguaucaaag

SEQ ID NO: 63351 - RNA, 19 nt, Artificial Sequence
  Sense Oligo
uuugauacuuaggaccucu

SEQ ID NO: 63352 - RNA, 19 nt, Artificial Sequence
  Antisense Oligo
agagguccuaaguaucaaa

SEQ ID NO: 63353 - RNA, 19 nt, Artificial Sequence
  Sense Oligo
uugauacuuaggaccucuc

SEQ ID NO: 63354 - RNA, 19 nt, Artificial Sequence
  Antisense Oligo
gagagguccuaaguaucaa

SEQ ID NO: 63355 - RNA, 19 nt, Artificial Sequence
  Sense Oligo
ugauacuuaggaccucucu

SEQ ID NO: 63356 - RNA, 19 nt, Artificial Sequence
  Antisense Oligo
agagagguccuaaguauca

SEQ ID NO: 63357 - RNA, 19 nt, Artificial Sequence
  Sense Oligo
gauacuuaggaccucucug

SEQ ID NO: 63358 - RNA, 19 nt, Artificial Sequence
  Antisense Oligo
cagagagguccuaaguauc

SEQ ID NO: 63359 - RNA, 19 nt, Artificial Sequence
  Sense Oligo
uacuuaggaccucucugga

SEQ ID NO: 63360 - RNA, 19 nt, Artificial Sequence
  Antisense Oligo
uccagagagguccuaagua

SEQ ID NO: 63361 - RNA, 19 nt, Artificial Sequence
  Sense Oligo
uaggaccucucuggacuaa

SEQ ID NO: 63362 - RNA, 19 nt, Artificial Sequence
  Antisense Oligo
uuaguccagagagguccua

SEQ ID NO: 63363 - RNA, 19 nt, Artificial Sequence
  Sense Oligo
ggaccucucuggacuaauu

SEQ ID NO: 63364 - RNA, 19 nt, Artificial Sequence
  Antisense Oligo
aauuaguccagagaggucc

SEQ ID NO: 63365 - RNA, 19 nt, Artificial Sequence
  Sense Oligo
gaccucucuggacuaauuu

SEQ ID NO: 63366 - RNA, 19 nt, Artificial Sequence
  Antisense Oligo
aaauuaguccagagagguc

SEQ ID NO: 63367 - RNA, 19 nt, Artificial Sequence
  Sense Oligo
accucucuggacuaauuuc

SEQ ID NO: 63368 - RNA, 19 nt, Artificial Sequence
  Antisense Oligo
gaaauuaguccagagaggu

SEQ ID NO: 63369 - RNA, 19 nt, Artificial Sequence
  Sense Oligo
gcacagcuauugauauguu

SEQ ID NO: 63370 - RNA, 19 nt, Artificial Sequence
  Antisense Oligo
aacauaucaauagcugugc

SEQ ID NO: 63371 - RNA, 19 nt, Artificial Sequence
  Sense Oligo
cacagcuauugauauguua

SEQ ID NO: 63372 - RNA, 19 nt, Artificial Sequence
  Antisense Oligo
uaacauaucaauagcugug

SEQ ID NO: 63373 - RNA, 19 nt, Artificial Sequence
  Sense Oligo
acagcuauugauauguuag

SEQ ID NO: 63374 - RNA, 19 nt, Artificial Sequence
  Antisense Oligo
cuaacauaucaauagcugu

SEQ ID NO: 63375 - RNA, 19 nt, Artificial Sequence
  Sense Oligo
cagcuauugauauguuaga

SEQ ID NO: 63376 - RNA, 19 nt, Artificial Sequence
  Antisense Oligo
ucuaacauaucaauagcug

SEQ ID NO: 63377 - RNA, 19 nt, Artificial Sequence
  Sense Oligo
agcuauugauauguuagag

SEQ ID NO: 63378 - RNA, 19 nt, Artificial Sequence
  Antisense Oligo
cucuaacauaucaauagcu

SEQ ID NO: 63379 - RNA, 19 nt, Artificial Sequence
  Sense Oligo
cuauugauauguuagaggc

SEQ ID NO: 63380 - RNA, 19 nt, Artificial Sequence
  Antisense Oligo
gccucuaacauaucaauag

SEQ ID NO: 63381 - RNA, 19 nt, Artificial Sequence
  Sense Oligo
auugauauguuagaggcag

SEQ ID NO: 63382 - RNA, 19 nt, Artificial Sequence
  Antisense Oligo
cugccucuaacauaucaau

SEQ ID NO: 63383 - RNA, 19 nt, Artificial Sequence
  Sense Oligo
uugauauguuagaggcagu

SEQ ID NO: 63384 - RNA, 19 nt, Artificial Sequence
  Antisense Oligo
acugccucuaacauaucaa

SEQ ID NO: 63385 - RNA, 19 nt, Artificial Sequence
  Sense Oligo
ugauauguuagaggcagua

SEQ ID NO: 63386 - RNA, 19 nt, Artificial Sequence
  Antisense Oligo
uacugccucuaacauauca

SEQ ID NO: 63387 - RNA, 19 nt, Artificial Sequence
  Sense Oligo
gauauguuagaggcaguau

SEQ ID NO: 63388 - RNA, 19 nt, Artificial Sequence
  Antisense Oligo
auacugccucuaacauauc

SEQ ID NO: 63389 - RNA, 19 nt, Artificial Sequence
  Sense Oligo
auauguuagaggcaguauc

SEQ ID NO: 63390 - RNA, 19 nt, Artificial Sequence
  Antisense Oligo
gauacugccucuaacauau

SEQ ID NO: 63391 - RNA, 19 nt, Artificial Sequence
  Sense Oligo
uauguuagaggcaguaucc

SEQ ID NO: 63392 - RNA, 19 nt, Artificial Sequence
  Antisense Oligo
ggauacugccucuaacaua

SEQ ID NO: 63393 - RNA, 19 nt, Artificial Sequence
  Sense Oligo
auguuagaggcaguauccu

SEQ ID NO: 63394 - RNA, 19 nt, Artificial Sequence
  Antisense Oligo
aggauacugccucuaacau

SEQ ID NO: 63395 - RNA, 19 nt, Artificial Sequence
  Sense Oligo
uguuagaggcaguauccuu

SEQ ID NO: 63396 - RNA, 19 nt, Artificial Sequence
  Antisense Oligo
aaggauacugccucuaaca

SEQ ID NO: 63397 - RNA, 19 nt, Artificial Sequence
  Sense Oligo
guuagaggcaguauccuua

SEQ ID NO: 63398 - RNA, 19 nt, Artificial Sequence
  Antisense Oligo
uaaggauacugccucuaac

SEQ ID NO: 63399 - RNA, 19 nt, Artificial Sequence
  Sense Oligo
uuagaggcaguauccuuaa

SEQ ID NO: 63400 - RNA, 19 nt, Artificial Sequence
  Antisense Oligo
uuaaggauacugccucuaa

SEQ ID NO: 63401 - RNA, 19 nt, Artificial Sequence
  Sense Oligo
uagaggcaguauccuuaau

SEQ ID NO: 63402 - RNA, 19 nt, Artificial Sequence
  Antisense Oligo
auuaaggauacugccucua

SEQ ID NO: 63403 - RNA, 19 nt, Artificial Sequence
  Sense Oligo
agaggcaguauccuuaaua

SEQ ID NO: 63404 - RNA, 19 nt, Artificial Sequence
  Antisense Oligo
uauuaaggauacugccucu

SEQ ID NO: 63405 - RNA, 19 nt, Artificial Sequence
  Sense Oligo
gaggcaguauccuuaauau

SEQ ID NO: 63406 - RNA, 19 nt, Artificial Sequence
  Antisense Oligo
auauuaaggauacugccuc

SEQ ID NO: 63407 - RNA, 19 nt, Artificial Sequence
  Sense Oligo
aggcaguauccuuaauauu

SEQ ID NO: 63408 - RNA, 19 nt, Artificial Sequence
  Antisense Oligo
aauauuaaggauacugccu

SEQ ID NO: 63409 - RNA, 19 nt, Artificial Sequence
  Sense Oligo
ggcaguauccuuaauauuc

SEQ ID NO: 63410 - RNA, 19 nt, Artificial Sequence
  Antisense Oligo
gaauauuaaggauacugcc

SEQ ID NO: 63411 - RNA, 19 nt, Artificial Sequence
  Sense Oligo
gcaguauccuuaauauuca

SEQ ID NO: 63412 - RNA, 19 nt, Artificial Sequence
  Antisense Oligo
ugaauauuaaggauacugc

SEQ ID NO: 63413 - RNA, 19 nt, Artificial Sequence
  Sense Oligo
uucuaaaugaguuaacgac

SEQ ID NO: 63414 - RNA, 19 nt, Artificial Sequence
  Antisense Oligo
gucguuaacucauuuagaa

SEQ ID NO: 63415 - RNA, 19 nt, Artificial Sequence
  Sense Oligo
ucuaaaugaguuaacgacu

SEQ ID NO: 63416 - RNA, 19 nt, Artificial Sequence
  Antisense Oligo
agucguuaacucauuuaga

SEQ ID NO: 63417 - RNA, 19 nt, Artificial Sequence
  Sense Oligo
cuaaaugaguuaacgacuu

SEQ ID NO: 63418 - RNA, 19 nt, Artificial Sequence
  Antisense Oligo
aagucguuaacucauuuag

SEQ ID NO: 63419 - RNA, 19 nt, Artificial Sequence
  Sense Oligo
aaauugggccuaaggagug

SEQ ID NO: 63420 - RNA, 19 nt, Artificial Sequence
  Antisense Oligo
cacuccuuaggcccaauuu

SEQ ID NO: 63421 - RNA, 19 nt, Artificial Sequence
  Sense Oligo
auugggccuaaggagugag

SEQ ID NO: 63422 - RNA, 19 nt, Artificial Sequence
  Antisense Oligo
cucacuccuuaggcccaau

SEQ ID NO: 63423 - RNA, 19 nt, Artificial Sequence
  Sense Oligo
caaaaugcuuguccaggac

SEQ ID NO: 63424 - RNA, 19 nt, Artificial Sequence
  Antisense Oligo
guccuggacaagcauuuug

SEQ ID NO: 63425 - RNA, 19 nt, Artificial Sequence
  Sense Oligo
aaaaugcuuguccaggacu

SEQ ID NO: 63426 - RNA, 19 nt, Artificial Sequence
  Antisense Oligo
aguccuggacaagcauuuu

SEQ ID NO: 63427 - RNA, 19 nt, Artificial Sequence
  Sense Oligo
aaaugcuuguccaggacuc

SEQ ID NO: 63428 - RNA, 19 nt, Artificial Sequence
  Antisense Oligo
gaguccuggacaagcauuu

SEQ ID NO: 63429 - RNA, 19 nt, Artificial Sequence
  Sense Oligo
aaugcuuguccaggacuca

SEQ ID NO: 63430 - RNA, 19 nt, Artificial Sequence
  Antisense Oligo
ugaguccuggacaagcauu

SEQ ID NO: 63431 - RNA, 19 nt, Artificial Sequence
  Sense Oligo
gcaggaggcacggaaggaa

SEQ ID NO: 63432 - RNA, 19 nt, Artificial Sequence
  Antisense Oligo
uuccuuccgugccuccugc

SEQ ID NO: 63433 - RNA, 19 nt, Artificial Sequence
  Sense Oligo
cucacugucauggugccac

SEQ ID NO: 63434 - RNA, 19 nt, Artificial Sequence
  Antisense Oligo
guggcaccaugacagugag

SEQ ID NO: 63435 - RNA, 19 nt, Artificial Sequence
  Sense Oligo
ucacugucauggugccacc

SEQ ID NO: 63436 - RNA, 19 nt, Artificial Sequence
  Antisense Oligo
gguggcaccaugacaguga

SEQ ID NO: 63437 - RNA, 19 nt, Artificial Sequence
  Sense Oligo
gugccaccagugucugaug

SEQ ID NO: 63438 - RNA, 19 nt, Artificial Sequence
  Antisense Oligo
caucagacacugguggcac

SEQ ID NO: 63439 - RNA, 19 nt, Artificial Sequence
  Sense Oligo
ugccaccagugucugauga

SEQ ID NO: 63440 - RNA, 19 nt, Artificial Sequence
  Antisense Oligo
ucaucagacacugguggca

SEQ ID NO: 63441 - RNA, 19 nt, Artificial Sequence
  Sense Oligo
gccaccagugucugaugaa

SEQ ID NO: 63442 - RNA, 19 nt, Artificial Sequence
  Antisense Oligo
uucaucagacacugguggc

SEQ ID NO: 63443 - RNA, 19 nt, Artificial Sequence
  Sense Oligo
ccaccagugucugaugaag

SEQ ID NO: 63444 - RNA, 19 nt, Artificial Sequence
  Antisense Oligo
cuucaucagacacuggugg

SEQ ID NO: 63445 - RNA, 19 nt, Artificial Sequence
  Sense Oligo
cugaugaagggcagaguga

SEQ ID NO: 63446 - RNA, 19 nt, Artificial Sequence
  Antisense Oligo
ucacucugcccuucaucag

SEQ ID NO: 63447 - RNA, 19 nt, Artificial Sequence
  Sense Oligo
gaagggcagagugacccag

SEQ ID NO: 63448 - RNA, 19 nt, Artificial Sequence
  Antisense Oligo
cugggucacucugcccuuc

SEQ ID NO: 63449 - RNA, 19 nt, Artificial Sequence
  Sense Oligo
aagggcagagugacccaga

SEQ ID NO: 63450 - RNA, 19 nt, Artificial Sequence
  Antisense Oligo
ucugggucacucugcccuu

SEQ ID NO: 63451 - RNA, 19 nt, Artificial Sequence
  Sense Oligo
gggcagagugacccagacu

SEQ ID NO: 63452 - RNA, 19 nt, Artificial Sequence
  Antisense Oligo
agucugggucacucugccc

SEQ ID NO: 63453 - RNA, 19 nt, Artificial Sequence
  Sense Oligo
gcaggcaguaacugacuuc

SEQ ID NO: 63454 - RNA, 19 nt, Artificial Sequence
  Antisense Oligo
gaagucaguuacugccugc

SEQ ID NO: 63455 - RNA, 19 nt, Artificial Sequence
  Sense Oligo
caggcaguaacugacuuca

SEQ ID NO: 63456 - RNA, 19 nt, Artificial Sequence
  Antisense Oligo
ugaagucaguuacugccug

SEQ ID NO: 63457 - RNA, 19 nt, Artificial Sequence
  Sense Oligo
aggcaguaacugacuucac

SEQ ID NO: 63458 - RNA, 19 nt, Artificial Sequence
  Antisense Oligo
gugaagucaguuacugccu

SEQ ID NO: 63459 - RNA, 19 nt, Artificial Sequence
  Sense Oligo
ggcaguaacugacuucaca

SEQ ID NO: 63460 - RNA, 19 nt, Artificial Sequence
  Antisense Oligo
ugugaagucaguuacugcc

SEQ ID NO: 63461 - RNA, 19 nt, Artificial Sequence
  Sense Oligo
cacagucccuggcauuuag

SEQ ID NO: 63462 - RNA, 19 nt, Artificial Sequence
  Antisense Oligo
cuaaaugccagggacugug

SEQ ID NO: 63463 - RNA, 19 nt, Artificial Sequence
  Sense Oligo
cagucccuggcauuuaguc

SEQ ID NO: 63464 - RNA, 19 nt, Artificial Sequence
  Antisense Oligo
gacuaaaugccagggacug

SEQ ID NO: 63465 - RNA, 19 nt, Artificial Sequence
  Sense Oligo
agucccuggcauuuaguca

SEQ ID NO: 63466 - RNA, 19 nt, Artificial Sequence
  Antisense Oligo
ugacuaaaugccagggacu

SEQ ID NO: 63467 - RNA, 19 nt, Artificial Sequence
  Sense Oligo
gucccuggcauuuagucau

SEQ ID NO: 63468 - RNA, 19 nt, Artificial Sequence
  Antisense Oligo
augacuaaaugccagggac

SEQ ID NO: 63469 - RNA, 19 nt, Artificial Sequence
  Sense Oligo
ucccuggcauuuagucauc

SEQ ID NO: 63470 - RNA, 19 nt, Artificial Sequence
  Antisense Oligo
gaugacuaaaugccaggga

SEQ ID NO: 63471 - RNA, 19 nt, Artificial Sequence
  Sense Oligo
cccuggcauuuagucaucu

SEQ ID NO: 63472 - RNA, 19 nt, Artificial Sequence
  Antisense Oligo
agaugacuaaaugccaggg

SEQ ID NO: 63473 - RNA, 19 nt, Artificial Sequence
  Sense Oligo
ccuggcauuuagucaucug

SEQ ID NO: 63474 - RNA, 19 nt, Artificial Sequence
  Antisense Oligo
cagaugacuaaaugccagg

SEQ ID NO: 63475 - RNA, 19 nt, Artificial Sequence
  Sense Oligo
cuggcauuuagucaucugu

SEQ ID NO: 63476 - RNA, 19 nt, Artificial Sequence
  Antisense Oligo
acagaugacuaaaugccag

SEQ ID NO: 63477 - RNA, 19 nt, Artificial Sequence
  Sense Oligo
uggcauuuagucaucugug

SEQ ID NO: 63478 - RNA, 19 nt, Artificial Sequence
  Antisense Oligo
cacagaugacuaaaugcca

SEQ ID NO: 63479 - RNA, 19 nt, Artificial Sequence
  Sense Oligo
auuuagucaucugugauug

SEQ ID NO: 63480 - RNA, 19 nt, Artificial Sequence
  Antisense Oligo
caaucacagaugacuaaau

SEQ ID NO: 63481 - RNA, 19 nt, Artificial Sequence
  Sense Oligo
uuuagucaucugugauugu

SEQ ID NO: 63482 - RNA, 19 nt, Artificial Sequence
  Antisense Oligo
acaaucacagaugacuaaa

SEQ ID NO: 63483 - RNA, 19 nt, Artificial Sequence
  Sense Oligo
uuagucaucugugauuguu

SEQ ID NO: 63484 - RNA, 19 nt, Artificial Sequence
  Antisense Oligo
aacaaucacagaugacuaa

SEQ ID NO: 63485 - RNA, 19 nt, Artificial Sequence
  Sense Oligo
uagucaucugugauuguuu

SEQ ID NO: 63486 - RNA, 19 nt, Artificial Sequence
  Antisense Oligo
aaacaaucacagaugacua

SEQ ID NO: 63487 - RNA, 19 nt, Artificial Sequence
  Sense Oligo
agucaucugugauuguuuu

SEQ ID NO: 63488 - RNA, 19 nt, Artificial Sequence
  Antisense Oligo
aaaacaaucacagaugacu

SEQ ID NO: 63489 - RNA, 19 nt, Artificial Sequence
  Sense Oligo
gucaucugugauuguuuua

SEQ ID NO: 63490 - RNA, 19 nt, Artificial Sequence
  Antisense Oligo
uaaaacaaucacagaugac

SEQ ID NO: 63491 - RNA, 19 nt, Artificial Sequence
  Sense Oligo
caucugugauuguuuuauc

SEQ ID NO: 63492 - RNA, 19 nt, Artificial Sequence
  Antisense Oligo
gauaaaacaaucacagaug

SEQ ID NO: 63493 - RNA, 19 nt, Artificial Sequence
  Sense Oligo
uggacugugcagagccacc

SEQ ID NO: 63494 - RNA, 19 nt, Artificial Sequence
  Antisense Oligo
gguggcucugcacagucca

SEQ ID NO: 63495 - RNA, 19 nt, Artificial Sequence
  Sense Oligo
ggacugugcagagccaccu

SEQ ID NO: 63496 - RNA, 19 nt, Artificial Sequence
  Antisense Oligo
agguggcucugcacagucc

SEQ ID NO: 63497 - RNA, 19 nt, Artificial Sequence
  Sense Oligo
agaucugcauuccgacugc

SEQ ID NO: 63498 - RNA, 19 nt, Artificial Sequence
  Antisense Oligo
gcagucggaaugcagaucu

SEQ ID NO: 63499 - RNA, 19 nt, Artificial Sequence
  Sense Oligo
gggcuggcuugcugaaguc

SEQ ID NO: 63500 - RNA, 19 nt, Artificial Sequence
  Antisense Oligo
gacuucagcaagccagccc

SEQ ID NO: 63501 - RNA, 19 nt, Artificial Sequence
  Sense Oligo
ggcuggcuugcugaagucu

SEQ ID NO: 63502 - RNA, 19 nt, Artificial Sequence
  Antisense Oligo
agacuucagcaagccagcc

SEQ ID NO: 63503 - RNA, 19 nt, Artificial Sequence
  Sense Oligo
gcuggcuugcugaagucuu

SEQ ID NO: 63504 - RNA, 19 nt, Artificial Sequence
  Antisense Oligo
aagacuucagcaagccagc

SEQ ID NO: 63505 - RNA, 19 nt, Artificial Sequence
  Sense Oligo
gucuucaacuugcacucgg

SEQ ID NO: 63506 - RNA, 19 nt, Artificial Sequence
  Antisense Oligo
ccgagugcaaguugaagac

SEQ ID NO: 63507 - RNA, 19 nt, Artificial Sequence
  Sense Oligo
ucuucaacuugcacucgga

SEQ ID NO: 63508 - RNA, 19 nt, Artificial Sequence
  Antisense Oligo
uccgagugcaaguugaaga

SEQ ID NO: 63509 - RNA, 19 nt, Artificial Sequence
  Sense Oligo
cuucaacuugcacucggag

SEQ ID NO: 63510 - RNA, 19 nt, Artificial Sequence
  Antisense Oligo
cuccgagugcaaguugaag

SEQ ID NO: 63511 - RNA, 19 nt, Artificial Sequence
  Sense Oligo
uucaacuugcacucggagc

SEQ ID NO: 63512 - RNA, 19 nt, Artificial Sequence
  Antisense Oligo
gcuccgagugcaaguugaa

SEQ ID NO: 63513 - RNA, 19 nt, Artificial Sequence
  Sense Oligo
ucaacuugcacucggagcu

SEQ ID NO: 63514 - RNA, 19 nt, Artificial Sequence
  Antisense Oligo
agcuccgagugcaaguuga

SEQ ID NO: 63515 - RNA, 19 nt, Artificial Sequence
  Sense Oligo
caacuugcacucggagcuc

SEQ ID NO: 63516 - RNA, 19 nt, Artificial Sequence
  Antisense Oligo
gagcuccgagugcaaguug

SEQ ID NO: 63517 - RNA, 19 nt, Artificial Sequence
  Sense Oligo
aacuugcacucggagcucc

SEQ ID NO: 63518 - RNA, 19 nt, Artificial Sequence
  Antisense Oligo
ggagcuccgagugcaaguu

SEQ ID NO: 63519 - RNA, 19 nt, Artificial Sequence
  Sense Oligo
ugcacucggagcuccuuug

SEQ ID NO: 63520 - RNA, 19 nt, Artificial Sequence
  Antisense Oligo
caaaggagcuccgagugca

SEQ ID NO: 63521 - RNA, 19 nt, Artificial Sequence
  Sense Oligo
gcacucggagcuccuuuga

SEQ ID NO: 63522 - RNA, 19 nt, Artificial Sequence
  Antisense Oligo
ucaaaggagcuccgagugc

SEQ ID NO: 63523 - RNA, 19 nt, Artificial Sequence
  Sense Oligo
acucggagcuccuuugaua

SEQ ID NO: 63524 - RNA, 19 nt, Artificial Sequence
  Antisense Oligo
uaucaaaggagcuccgagu

SEQ ID NO: 63525 - RNA, 19 nt, Artificial Sequence
  Sense Oligo
cucggagcuccuuugauac

SEQ ID NO: 63526 - RNA, 19 nt, Artificial Sequence
  Antisense Oligo
guaucaaaggagcuccgag

SEQ ID NO: 63527 - RNA, 19 nt, Artificial Sequence
  Sense Oligo
ucggagcuccuuugauacc

SEQ ID NO: 63528 - RNA, 19 nt, Artificial Sequence
  Antisense Oligo
gguaucaaaggagcuccga

SEQ ID NO: 63529 - RNA, 19 nt, Artificial Sequence
  Sense Oligo
cggagcuccuuugauaccu

SEQ ID NO: 63530 - RNA, 19 nt, Artificial Sequence
  Antisense Oligo
agguaucaaaggagcuccg

SEQ ID NO: 63531 - RNA, 19 nt, Artificial Sequence
  Sense Oligo
gcuccuuugauaccucaga

SEQ ID NO: 63532 - RNA, 19 nt, Artificial Sequence
  Antisense Oligo
ucugagguaucaaaggagc

SEQ ID NO: 63533 - RNA, 19 nt, Artificial Sequence
  Sense Oligo
cuuugauaccucagagcug

SEQ ID NO: 63534 - RNA, 19 nt, Artificial Sequence
  Antisense Oligo
cagcucugagguaucaaag

SEQ ID NO: 63535 - RNA, 19 nt, Artificial Sequence
  Sense Oligo
uuugauaccucagagcugg

SEQ ID NO: 63536 - RNA, 19 nt, Artificial Sequence
  Antisense Oligo
ccagcucugagguaucaaa

SEQ ID NO: 63537 - RNA, 19 nt, Artificial Sequence
  Sense Oligo
uugauaccucagagcuggc

SEQ ID NO: 63538 - RNA, 19 nt, Artificial Sequence
  Antisense Oligo
gccagcucugagguaucaa

SEQ ID NO: 63539 - RNA, 19 nt, Artificial Sequence
  Sense Oligo
ugauaccucagagcuggcu

SEQ ID NO: 63540 - RNA, 19 nt, Artificial Sequence
  Antisense Oligo
agccagcucugagguauca

SEQ ID NO: 63541 - RNA, 19 nt, Artificial Sequence
  Sense Oligo
gauaccucagagcuggcug

SEQ ID NO: 63542 - RNA, 19 nt, Artificial Sequence
  Antisense Oligo
cagccagcucugagguauc

SEQ ID NO: 63543 - RNA, 19 nt, Artificial Sequence
  Sense Oligo
auaccucagagcuggcugu

SEQ ID NO: 63544 - RNA, 19 nt, Artificial Sequence
  Antisense Oligo
acagccagcucugagguau

SEQ ID NO: 63545 - RNA, 19 nt, Artificial Sequence
  Sense Oligo
uaccucagagcuggcuguc

SEQ ID NO: 63546 - RNA, 19 nt, Artificial Sequence
  Antisense Oligo
gacagccagcucugaggua

SEQ ID NO: 63547 - RNA, 19 nt, Artificial Sequence
  Sense Oligo
accucagagcuggcuguca

SEQ ID NO: 63548 - RNA, 19 nt, Artificial Sequence
  Antisense Oligo
ugacagccagcucugaggu

SEQ ID NO: 63549 - RNA, 19 nt, Artificial Sequence
  Sense Oligo
cucagagcuggcugucagg

SEQ ID NO: 63550 - RNA, 19 nt, Artificial Sequence
  Antisense Oligo
ccugacagccagcucugag

SEQ ID NO: 63551 - RNA, 19 nt, Artificial Sequence
  Sense Oligo
cagagcuggcugucaggug

SEQ ID NO: 63552 - RNA, 19 nt, Artificial Sequence
  Antisense Oligo
caccugacagccagcucug

SEQ ID NO: 63553 - RNA, 19 nt, Artificial Sequence
  Sense Oligo
agagcuggcugucaggugg

SEQ ID NO: 63554 - RNA, 19 nt, Artificial Sequence
  Antisense Oligo
ccaccugacagccagcucu

SEQ ID NO: 63555 - RNA, 19 nt, Artificial Sequence
  Sense Oligo
agcuggcugucagguggca

SEQ ID NO: 63556 - RNA, 19 nt, Artificial Sequence
  Antisense Oligo
ugccaccugacagccagcu

SEQ ID NO: 63557 - RNA, 19 nt, Artificial Sequence
  Sense Oligo
cugucagguggcagcucac

SEQ ID NO: 63558 - RNA, 19 nt, Artificial Sequence
  Antisense Oligo
gugagcugccaccugacag

SEQ ID NO: 63559 - RNA, 19 nt, Artificial Sequence
  Sense Oligo
ugucagguggcagcucaca

SEQ ID NO: 63560 - RNA, 19 nt, Artificial Sequence
  Antisense Oligo
ugugagcugccaccugaca

SEQ ID NO: 63561 - RNA, 19 nt, Artificial Sequence
  Sense Oligo
ggcagcucacacccagacu

SEQ ID NO: 63562 - RNA, 19 nt, Artificial Sequence
  Antisense Oligo
agucugggugugagcugcc

SEQ ID NO: 63563 - RNA, 19 nt, Artificial Sequence
  Sense Oligo
gcagcucacacccagacuc

SEQ ID NO: 63564 - RNA, 19 nt, Artificial Sequence
  Antisense Oligo
gagucugggugugagcugc

SEQ ID NO: 63565 - RNA, 19 nt, Artificial Sequence
  Sense Oligo
cagcucacacccagacuca

SEQ ID NO: 63566 - RNA, 19 nt, Artificial Sequence
  Antisense Oligo
ugagucugggugugagcug

SEQ ID NO: 63567 - RNA, 19 nt, Artificial Sequence
  Sense Oligo
acucacuggccacaccuca

SEQ ID NO: 63568 - RNA, 19 nt, Artificial Sequence
  Antisense Oligo
ugagguguggccagugagu

SEQ ID NO: 63569 - RNA, 19 nt, Artificial Sequence
  Sense Oligo
cucacuggccacaccucag

SEQ ID NO: 63570 - RNA, 19 nt, Artificial Sequence
  Antisense Oligo
cugagguguggccagugag

SEQ ID NO: 63571 - RNA, 19 nt, Artificial Sequence
  Sense Oligo
agucgagugucagucucuu

SEQ ID NO: 63572 - RNA, 19 nt, Artificial Sequence
  Antisense Oligo
aagagacugacacucgacu

SEQ ID NO: 63573 - RNA, 19 nt, Artificial Sequence
  Sense Oligo
gucgagugucagucucuuu

SEQ ID NO: 63574 - RNA, 19 nt, Artificial Sequence
  Antisense Oligo
aaagagacugacacucgac

SEQ ID NO: 63575 - RNA, 19 nt, Artificial Sequence
  Sense Oligo
ucgagugucagucucuuuc

SEQ ID NO: 63576 - RNA, 19 nt, Artificial Sequence
  Antisense Oligo
gaaagagacugacacucga

SEQ ID NO: 63577 - RNA, 19 nt, Artificial Sequence
  Sense Oligo
cgagugucagucucuuucu

SEQ ID NO: 63578 - RNA, 19 nt, Artificial Sequence
  Antisense Oligo
agaaagagacugacacucg

SEQ ID NO: 63579 - RNA, 19 nt, Artificial Sequence
  Sense Oligo
gagugucagucucuuucug

SEQ ID NO: 63580 - RNA, 19 nt, Artificial Sequence
  Antisense Oligo
cagaaagagacugacacuc

SEQ ID NO: 63581 - RNA, 19 nt, Artificial Sequence
  Sense Oligo
agugucagucucuuucugu

SEQ ID NO: 63582 - RNA, 19 nt, Artificial Sequence
  Antisense Oligo
acagaaagagacugacacu

SEQ ID NO: 63583 - RNA, 19 nt, Artificial Sequence
  Sense Oligo
gugucagucucuuucugug

SEQ ID NO: 63584 - RNA, 19 nt, Artificial Sequence
  Antisense Oligo
cacagaaagagacugacac

SEQ ID NO: 63585 - RNA, 19 nt, Artificial Sequence
  Sense Oligo
ucuuucugugaaggcuuuu

SEQ ID NO: 63586 - RNA, 19 nt, Artificial Sequence
  Antisense Oligo
aaaagccuucacagaaaga

SEQ ID NO: 63587 - RNA, 19 nt, Artificial Sequence
  Sense Oligo
auuguuucauuuugugugc

SEQ ID NO: 63588 - RNA, 19 nt, Artificial Sequence
  Antisense Oligo
gcacacaaaaugaaacaau

SEQ ID NO: 63589 - RNA, 19 nt, Artificial Sequence
  Sense Oligo
uuguuucauuuugugugcu

SEQ ID NO: 63590 - RNA, 19 nt, Artificial Sequence
  Antisense Oligo
agcacacaaaaugaaacaa

SEQ ID NO: 63591 - RNA, 19 nt, Artificial Sequence
  Sense Oligo
uucauuuugugugcugugc

SEQ ID NO: 63592 - RNA, 19 nt, Artificial Sequence
  Antisense Oligo
gcacagcacacaaaaugaa

SEQ ID NO: 63593 - RNA, 19 nt, Artificial Sequence
  Sense Oligo
ucauuuugugugcugugcu

SEQ ID NO: 63594 - RNA, 19 nt, Artificial Sequence
  Antisense Oligo
agcacagcacacaaaauga

SEQ ID NO: 63595 - RNA, 19 nt, Artificial Sequence
  Sense Oligo
cauuuugugugcugugcuu

SEQ ID NO: 63596 - RNA, 19 nt, Artificial Sequence
  Antisense Oligo
aagcacagcacacaaaaug

SEQ ID NO: 63597 - RNA, 19 nt, Artificial Sequence
  Sense Oligo
auuuugugugcugugcuuc

SEQ ID NO: 63598 - RNA, 19 nt, Artificial Sequence
  Antisense Oligo
gaagcacagcacacaaaau

SEQ ID NO: 63599 - RNA, 19 nt, Artificial Sequence
  Sense Oligo
ugugugcugugcuucaaag

SEQ ID NO: 63600 - RNA, 19 nt, Artificial Sequence
  Antisense Oligo
cuuugaagcacagcacaca

SEQ ID NO: 63601 - RNA, 19 nt, Artificial Sequence
  Sense Oligo
gugugcugugcuucaaagc

SEQ ID NO: 63602 - RNA, 19 nt, Artificial Sequence
  Antisense Oligo
gcuuugaagcacagcacac

SEQ ID NO: 63603 - RNA, 19 nt, Artificial Sequence
  Sense Oligo
ugugcugugcuucaaagcc

SEQ ID NO: 63604 - RNA, 19 nt, Artificial Sequence
  Antisense Oligo
ggcuuugaagcacagcaca

SEQ ID NO: 63605 - RNA, 19 nt, Artificial Sequence
  Sense Oligo
gugcugugcuucaaagccu

SEQ ID NO: 63606 - RNA, 19 nt, Artificial Sequence
  Antisense Oligo
aggcuuugaagcacagcac

SEQ ID NO: 63607 - RNA, 19 nt, Artificial Sequence
  Sense Oligo
ugcugugcuucaaagccuu

SEQ ID NO: 63608 - RNA, 19 nt, Artificial Sequence
  Antisense Oligo
aaggcuuugaagcacagca

SEQ ID NO: 63609 - RNA, 19 nt, Artificial Sequence
  Sense Oligo
gcugugcuucaaagccuua

SEQ ID NO: 63610 - RNA, 19 nt, Artificial Sequence
  Antisense Oligo
uaaggcuuugaagcacagc

SEQ ID NO: 63611 - RNA, 19 nt, Artificial Sequence
  Sense Oligo
cugugcuucaaagccuuaa

SEQ ID NO: 63612 - RNA, 19 nt, Artificial Sequence
  Antisense Oligo
uuaaggcuuugaagcacag

SEQ ID NO: 63613 - RNA, 19 nt, Artificial Sequence
  Sense Oligo
ugugcuucaaagccuuaac

SEQ ID NO: 63614 - RNA, 19 nt, Artificial Sequence
  Antisense Oligo
guuaaggcuuugaagcaca

SEQ ID NO: 63615 - RNA, 19 nt, Artificial Sequence
  Sense Oligo
gugcuucaaagccuuaacu

SEQ ID NO: 63616 - RNA, 19 nt, Artificial Sequence
  Antisense Oligo
aguuaaggcuuugaagcac

SEQ ID NO: 63617 - RNA, 19 nt, Artificial Sequence
  Sense Oligo
uucaaagccuuaacuguca

SEQ ID NO: 63618 - RNA, 19 nt, Artificial Sequence
  Antisense Oligo
ugacaguuaaggcuuugaa

SEQ ID NO: 63619 - RNA, 19 nt, Artificial Sequence
  Sense Oligo
ucaaagccuuaacugucaa

SEQ ID NO: 63620 - RNA, 19 nt, Artificial Sequence
  Antisense Oligo
uugacaguuaaggcuuuga

SEQ ID NO: 63621 - RNA, 19 nt, Artificial Sequence
  Sense Oligo
caaagccuuaacugucaaa

SEQ ID NO: 63622 - RNA, 19 nt, Artificial Sequence
  Antisense Oligo
uuugacaguuaaggcuuug

SEQ ID NO: 63623 - RNA, 19 nt, Artificial Sequence
  Sense Oligo
aaagccuuaacugucaaau

SEQ ID NO: 63624 - RNA, 19 nt, Artificial Sequence
  Antisense Oligo
auuugacaguuaaggcuuu

SEQ ID NO: 63625 - RNA, 19 nt, Artificial Sequence
  Sense Oligo
aagccuuaacugucaaauc

SEQ ID NO: 63626 - RNA, 19 nt, Artificial Sequence
  Antisense Oligo
gauuugacaguuaaggcuu

SEQ ID NO: 63627 - RNA, 19 nt, Artificial Sequence
  Sense Oligo
agccuuaacugucaaaucu

SEQ ID NO: 63628 - RNA, 19 nt, Artificial Sequence
  Antisense Oligo
agauuugacaguuaaggcu

SEQ ID NO: 63629 - RNA, 19 nt, Artificial Sequence
  Sense Oligo
gccuuaacugucaaaucuu

SEQ ID NO: 63630 - RNA, 19 nt, Artificial Sequence
  Antisense Oligo
aagauuugacaguuaaggc

SEQ ID NO: 63631 - RNA, 19 nt, Artificial Sequence
  Sense Oligo
ccuuaacugucaaaucuug

SEQ ID NO: 63632 - RNA, 19 nt, Artificial Sequence
  Antisense Oligo
caagauuugacaguuaagg

SEQ ID NO: 63633 - RNA, 19 nt, Artificial Sequence
  Sense Oligo
cuuaacugucaaaucuugc

SEQ ID NO: 63634 - RNA, 19 nt, Artificial Sequence
  Antisense Oligo
gcaagauuugacaguuaag

SEQ ID NO: 63635 - RNA, 19 nt, Artificial Sequence
  Sense Oligo
uuaacugucaaaucuugca

SEQ ID NO: 63636 - RNA, 19 nt, Artificial Sequence
  Antisense Oligo
ugcaagauuugacaguuaa

SEQ ID NO: 63637 - RNA, 19 nt, Artificial Sequence
  Sense Oligo
uaacugucaaaucuugcau

SEQ ID NO: 63638 - RNA, 19 nt, Artificial Sequence
  Antisense Oligo
augcaagauuugacaguua

SEQ ID NO: 63639 - RNA, 19 nt, Artificial Sequence
  Sense Oligo
uacuugucacaccugucuu

SEQ ID NO: 63640 - RNA, 19 nt, Artificial Sequence
  Antisense Oligo
aagacaggugugacaagua

SEQ ID NO: 63641 - RNA, 19 nt, Artificial Sequence
  Sense Oligo
ugucacaccugucuuaaua

SEQ ID NO: 63642 - RNA, 19 nt, Artificial Sequence
  Antisense Oligo
uauuaagacaggugugaca

SEQ ID NO: 63643 - RNA, 19 nt, Artificial Sequence
  Sense Oligo
gucacaccugucuuaauaa

SEQ ID NO: 63644 - RNA, 19 nt, Artificial Sequence
  Antisense Oligo
uuauuaagacaggugugac

SEQ ID NO: 63645 - RNA, 19 nt, Artificial Sequence
  Sense Oligo
ucacaccugucuuaauaaa

SEQ ID NO: 63646 - RNA, 19 nt, Artificial Sequence
  Antisense Oligo
uuuauuaagacagguguga

SEQ ID NO: 63647 - RNA, 19 nt, Artificial Sequence
  Sense Oligo
gggcagagcuucuauuuau

SEQ ID NO: 63648 - RNA, 19 nt, Artificial Sequence
  Antisense Oligo
auaaauagaagcucugccc

SEQ ID NO: 63649 - RNA, 19 nt, Artificial Sequence
  Sense Oligo
ggcagagcuucuauuuaug

SEQ ID NO: 63650 - RNA, 19 nt, Artificial Sequence
  Antisense Oligo
cauaaauagaagcucugcc

SEQ ID NO: 63651 - RNA, 19 nt, Artificial Sequence
  Sense Oligo
gcagagcuucuauuuaugg

SEQ ID NO: 63652 - RNA, 19 nt, Artificial Sequence
  Antisense Oligo
ccauaaauagaagcucugc

SEQ ID NO: 63653 - RNA, 19 nt, Artificial Sequence
  Sense Oligo
cagagcuucuauuuauggc

SEQ ID NO: 63654 - RNA, 19 nt, Artificial Sequence
  Antisense Oligo
gccauaaauagaagcucug

SEQ ID NO: 63655 - RNA, 19 nt, Artificial Sequence
  Sense Oligo
agagcuucuauuuauggca

SEQ ID NO: 63656 - RNA, 19 nt, Artificial Sequence
  Antisense Oligo
ugccauaaauagaagcucu

SEQ ID NO: 63657 - RNA, 19 nt, Artificial Sequence
  Sense Oligo
gagcuucuauuuauggcac

SEQ ID NO: 63658 - RNA, 19 nt, Artificial Sequence
  Antisense Oligo
gugccauaaauagaagcuc

SEQ ID NO: 63659 - RNA, 19 nt, Artificial Sequence
  Sense Oligo
agcuucuauuuauggcaca

SEQ ID NO: 63660 - RNA, 19 nt, Artificial Sequence
  Antisense Oligo
ugugccauaaauagaagcu

SEQ ID NO: 63661 - RNA, 19 nt, Artificial Sequence
  Sense Oligo
ggcacauagacaucagcua

SEQ ID NO: 63662 - RNA, 19 nt, Artificial Sequence
  Antisense Oligo
uagcugaugucuaugugcc

SEQ ID NO: 63663 - RNA, 19 nt, Artificial Sequence
  Sense Oligo
gcacauagacaucagcuag

SEQ ID NO: 63664 - RNA, 19 nt, Artificial Sequence
  Antisense Oligo
cuagcugaugucuaugugc

SEQ ID NO: 63665 - RNA, 19 nt, Artificial Sequence
  Sense Oligo
cacauagacaucagcuagg

SEQ ID NO: 63666 - RNA, 19 nt, Artificial Sequence
  Antisense Oligo
ccuagcugaugucuaugug

SEQ ID NO: 63667 - RNA, 19 nt, Artificial Sequence
  Sense Oligo
acauagacaucagcuaggc

SEQ ID NO: 63668 - RNA, 19 nt, Artificial Sequence
  Antisense Oligo
gccuagcugaugucuaugu

SEQ ID NO: 63669 - RNA, 19 nt, Artificial Sequence
  Sense Oligo
cauagacaucagcuaggcu

SEQ ID NO: 63670 - RNA, 19 nt, Artificial Sequence
  Antisense Oligo
agccuagcugaugucuaug

SEQ ID NO: 63671 - RNA, 19 nt, Artificial Sequence
  Sense Oligo
auagacaucagcuaggcuu

SEQ ID NO: 63672 - RNA, 19 nt, Artificial Sequence
  Antisense Oligo
aagccuagcugaugucuau

SEQ ID NO: 63673 - RNA, 19 nt, Artificial Sequence
  Sense Oligo
uagacaucagcuaggcuuu

SEQ ID NO: 63674 - RNA, 19 nt, Artificial Sequence
  Antisense Oligo
aaagccuagcugaugucua

SEQ ID NO: 63675 - RNA, 19 nt, Artificial Sequence
  Sense Oligo
agacaucagcuaggcuuuu

SEQ ID NO: 63676 - RNA, 19 nt, Artificial Sequence
  Antisense Oligo
aaaagccuagcugaugucu

SEQ ID NO: 63677 - RNA, 19 nt, Artificial Sequence
  Sense Oligo
acaucagcuaggcuuuugg

SEQ ID NO: 63678 - RNA, 19 nt, Artificial Sequence
  Antisense Oligo
ccaaaagccuagcugaugu

SEQ ID NO: 63679 - RNA, 19 nt, Artificial Sequence
  Sense Oligo
caucagcuaggcuuuuggg

SEQ ID NO: 63680 - RNA, 19 nt, Artificial Sequence
  Antisense Oligo
cccaaaagccuagcugaug

SEQ ID NO: 63681 - RNA, 19 nt, Artificial Sequence
  Sense Oligo
aucagcuaggcuuuuggga

SEQ ID NO: 63682 - RNA, 19 nt, Artificial Sequence
  Antisense Oligo
ucccaaaagccuagcugau

SEQ ID NO: 63683 - RNA, 19 nt, Artificial Sequence
  Sense Oligo
ucagcuaggcuuuugggaa

SEQ ID NO: 63684 - RNA, 19 nt, Artificial Sequence
  Antisense Oligo
uucccaaaagccuagcuga

SEQ ID NO: 63685 - RNA, 19 nt, Artificial Sequence
  Sense Oligo
cagcuaggcuuuugggaau

SEQ ID NO: 63686 - RNA, 19 nt, Artificial Sequence
  Antisense Oligo
auucccaaaagccuagcug

SEQ ID NO: 63687 - RNA, 19 nt, Artificial Sequence
  Sense Oligo
agcuaggcuuuugggaauc

SEQ ID NO: 63688 - RNA, 19 nt, Artificial Sequence
  Antisense Oligo
gauucccaaaagccuagcu

SEQ ID NO: 63689 - RNA, 19 nt, Artificial Sequence
  Sense Oligo
gcuaggcuuuugggaaucg

SEQ ID NO: 63690 - RNA, 19 nt, Artificial Sequence
  Antisense Oligo
cgauucccaaaagccuagc

SEQ ID NO: 63691 - RNA, 19 nt, Artificial Sequence
  Sense Oligo
cuaggcuuuugggaaucgu

SEQ ID NO: 63692 - RNA, 19 nt, Artificial Sequence
  Antisense Oligo
acgauucccaaaagccuag

SEQ ID NO: 63693 - RNA, 19 nt, Artificial Sequence
  Sense Oligo
uaggcuuuugggaaucguu

SEQ ID NO: 63694 - RNA, 19 nt, Artificial Sequence
  Antisense Oligo
aacgauucccaaaagccua

SEQ ID NO: 63695 - RNA, 19 nt, Artificial Sequence
  Sense Oligo
aggcuuuugggaaucguuu

SEQ ID NO: 63696 - RNA, 19 nt, Artificial Sequence
  Antisense Oligo
aaacgauucccaaaagccu

SEQ ID NO: 63697 - RNA, 19 nt, Artificial Sequence
  Sense Oligo
ggcuuuugggaaucguuug

SEQ ID NO: 63698 - RNA, 19 nt, Artificial Sequence
  Antisense Oligo
caaacgauucccaaaagcc

SEQ ID NO: 63699 - RNA, 19 nt, Artificial Sequence
  Sense Oligo
gcuuuugggaaucguuugu

SEQ ID NO: 63700 - RNA, 19 nt, Artificial Sequence
  Antisense Oligo
acaaacgauucccaaaagc

SEQ ID NO: 63701 - RNA, 19 nt, Artificial Sequence
  Sense Oligo
cuuuugggaaucguuugug

SEQ ID NO: 63702 - RNA, 19 nt, Artificial Sequence
  Antisense Oligo
cacaaacgauucccaaaag

SEQ ID NO: 63703 - RNA, 19 nt, Artificial Sequence
  Sense Oligo
uuuugggaaucguuugugu

SEQ ID NO: 63704 - RNA, 19 nt, Artificial Sequence
  Antisense Oligo
acacaaacgauucccaaaa

SEQ ID NO: 63705 - RNA, 19 nt, Artificial Sequence
  Sense Oligo
uuugggaaucguuuguguu

SEQ ID NO: 63706 - RNA, 19 nt, Artificial Sequence
  Antisense Oligo
aacacaaacgauucccaaa

SEQ ID NO: 63707 - RNA, 19 nt, Artificial Sequence
  Sense Oligo
ugggaaucguuuguguucu

SEQ ID NO: 63708 - RNA, 19 nt, Artificial Sequence
  Antisense Oligo
agaacacaaacgauuccca

SEQ ID NO: 63709 - RNA, 19 nt, Artificial Sequence
  Sense Oligo
gggaaucguuuguguucuu

SEQ ID NO: 63710 - RNA, 19 nt, Artificial Sequence
  Antisense Oligo
aagaacacaaacgauuccc

SEQ ID NO: 63711 - RNA, 19 nt, Artificial Sequence
  Sense Oligo
aucguuuguguucuuugug

SEQ ID NO: 63712 - RNA, 19 nt, Artificial Sequence
  Antisense Oligo
cacaaagaacacaaacgau

SEQ ID NO: 63713 - RNA, 19 nt, Artificial Sequence
  Sense Oligo
ucguuuguguucuuugugg

SEQ ID NO: 63714 - RNA, 19 nt, Artificial Sequence
  Antisense Oligo
ccacaaagaacacaaacga

SEQ ID NO: 63715 - RNA, 19 nt, Artificial Sequence
  Sense Oligo
cguuuguguucuuugugga

SEQ ID NO: 63716 - RNA, 19 nt, Artificial Sequence
  Antisense Oligo
uccacaaagaacacaaacg

SEQ ID NO: 63717 - RNA, 19 nt, Artificial Sequence
  Sense Oligo
guuuguguucuuuguggaa

SEQ ID NO: 63718 - RNA, 19 nt, Artificial Sequence
  Antisense Oligo
uuccacaaagaacacaaac

SEQ ID NO: 63719 - RNA, 19 nt, Artificial Sequence
  Sense Oligo
guccuuuagaagcacccau

SEQ ID NO: 63720 - RNA, 19 nt, Artificial Sequence
  Antisense Oligo
augggugcuucuaaaggac

SEQ ID NO: 63721 - RNA, 19 nt, Artificial Sequence
  Sense Oligo
uccuuuagaagcacccaug

SEQ ID NO: 63722 - RNA, 19 nt, Artificial Sequence
  Antisense Oligo
caugggugcuucuaaagga

SEQ ID NO: 63723 - RNA, 19 nt, Artificial Sequence
  Sense Oligo
ccuuuagaagcacccauga

SEQ ID NO: 63724 - RNA, 19 nt, Artificial Sequence
  Antisense Oligo
ucaugggugcuucuaaagg

SEQ ID NO: 63725 - RNA, 19 nt, Artificial Sequence
  Sense Oligo
cuuuagaagcacccaugaa

SEQ ID NO: 63726 - RNA, 19 nt, Artificial Sequence
  Antisense Oligo
uucaugggugcuucuaaag

SEQ ID NO: 63727 - RNA, 19 nt, Artificial Sequence
  Sense Oligo
uuuagaagcacccaugaag

SEQ ID NO: 63728 - RNA, 19 nt, Artificial Sequence
  Antisense Oligo
cuucaugggugcuucuaaa

SEQ ID NO: 63729 - RNA, 19 nt, Artificial Sequence
  Sense Oligo
uuagaagcacccaugaagu

SEQ ID NO: 63730 - RNA, 19 nt, Artificial Sequence
  Antisense Oligo
acuucaugggugcuucuaa

SEQ ID NO: 63731 - RNA, 19 nt, Artificial Sequence
  Sense Oligo
uagaagcacccaugaagua

SEQ ID NO: 63732 - RNA, 19 nt, Artificial Sequence
  Antisense Oligo
uacuucaugggugcuucua

SEQ ID NO: 63733 - RNA, 19 nt, Artificial Sequence
  Sense Oligo
agaagcacccaugaaguag

SEQ ID NO: 63734 - RNA, 19 nt, Artificial Sequence
  Antisense Oligo
cuacuucaugggugcuucu

SEQ ID NO: 63735 - RNA, 19 nt, Artificial Sequence
  Sense Oligo
gaagcacccaugaaguagu

SEQ ID NO: 63736 - RNA, 19 nt, Artificial Sequence
  Antisense Oligo
acuacuucaugggugcuuc

SEQ ID NO: 63737 - RNA, 19 nt, Artificial Sequence
  Sense Oligo
aagcacccaugaaguagug

SEQ ID NO: 63738 - RNA, 19 nt, Artificial Sequence
  Antisense Oligo
cacuacuucaugggugcuu

SEQ ID NO: 63739 - RNA, 19 nt, Artificial Sequence
  Sense Oligo
agcacccaugaaguagugu

SEQ ID NO: 63740 - RNA, 19 nt, Artificial Sequence
  Antisense Oligo
acacuacuucaugggugcu

SEQ ID NO: 63741 - RNA, 19 nt, Artificial Sequence
  Sense Oligo
gcacccaugaaguagugug

SEQ ID NO: 63742 - RNA, 19 nt, Artificial Sequence
  Antisense Oligo
cacacuacuucaugggugc

SEQ ID NO: 63743 - RNA, 19 nt, Artificial Sequence
  Sense Oligo
guguguucagacugugcac

SEQ ID NO: 63744 - RNA, 19 nt, Artificial Sequence
  Antisense Oligo
gugcacagucugaacacac

SEQ ID NO: 63745 - RNA, 19 nt, Artificial Sequence
  Sense Oligo
acgguggacuuuuccucug

SEQ ID NO: 63746 - RNA, 19 nt, Artificial Sequence
  Antisense Oligo
cagaggaaaaguccaccgu

SEQ ID NO: 63747 - RNA, 19 nt, Artificial Sequence
  Sense Oligo
cgguggacuuuuccucugg

SEQ ID NO: 63748 - RNA, 19 nt, Artificial Sequence
  Antisense Oligo
ccagaggaaaaguccaccg

SEQ ID NO: 63749 - RNA, 19 nt, Artificial Sequence
  Sense Oligo
gguggacuuuuccucugga

SEQ ID NO: 63750 - RNA, 19 nt, Artificial Sequence
  Antisense Oligo
uccagaggaaaaguccacc

SEQ ID NO: 63751 - RNA, 19 nt, Artificial Sequence
  Sense Oligo
cugagcgccacucccugua

SEQ ID NO: 63752 - RNA, 19 nt, Artificial Sequence
  Antisense Oligo
uacagggaguggcgcucag

SEQ ID NO: 63753 - RNA, 19 nt, Artificial Sequence
  Sense Oligo
gccacucccuguagccgau

SEQ ID NO: 63754 - RNA, 19 nt, Artificial Sequence
  Antisense Oligo
aucggcuacagggaguggc

SEQ ID NO: 63755 - RNA, 19 nt, Artificial Sequence
  Sense Oligo
ccacucccuguagccgauc

SEQ ID NO: 63756 - RNA, 19 nt, Artificial Sequence
  Antisense Oligo
gaucggcuacagggagugg

SEQ ID NO: 63757 - RNA, 19 nt, Artificial Sequence
  Sense Oligo
cacucccuguagccgaucu

SEQ ID NO: 63758 - RNA, 19 nt, Artificial Sequence
  Antisense Oligo
agaucggcuacagggagug

SEQ ID NO: 63759 - RNA, 19 nt, Artificial Sequence
  Sense Oligo
acucccuguagccgaucug

SEQ ID NO: 63760 - RNA, 19 nt, Artificial Sequence
  Antisense Oligo
cagaucggcuacagggagu

SEQ ID NO: 63761 - RNA, 19 nt, Artificial Sequence
  Sense Oligo
ccuguagccgaucugggac

SEQ ID NO: 63762 - RNA, 19 nt, Artificial Sequence
  Antisense Oligo
gucccagaucggcuacagg

SEQ ID NO: 63763 - RNA, 19 nt, Artificial Sequence
  Sense Oligo
cuguagccgaucugggacu

SEQ ID NO: 63764 - RNA, 19 nt, Artificial Sequence
  Antisense Oligo
agucccagaucggcuacag

SEQ ID NO: 63765 - RNA, 19 nt, Artificial Sequence
  Sense Oligo
cugccucagaaggaguccc

SEQ ID NO: 63766 - RNA, 19 nt, Artificial Sequence
  Antisense Oligo
gggacuccuucugaggcag

SEQ ID NO: 63767 - RNA, 19 nt, Artificial Sequence
  Sense Oligo
ggguacagguaggagcuaa

SEQ ID NO: 63768 - RNA, 19 nt, Artificial Sequence
  Antisense Oligo
uuagcuccuaccuguaccc

SEQ ID NO: 63769 - RNA, 19 nt, Artificial Sequence
  Sense Oligo
gguacagguaggagcuaac

SEQ ID NO: 63770 - RNA, 19 nt, Artificial Sequence
  Antisense Oligo
guuagcuccuaccuguacc

SEQ ID NO: 63771 - RNA, 19 nt, Artificial Sequence
  Sense Oligo
guacagguaggagcuaacu

SEQ ID NO: 63772 - RNA, 19 nt, Artificial Sequence
  Antisense Oligo
aguuagcuccuaccuguac

SEQ ID NO: 63773 - RNA, 19 nt, Artificial Sequence
  Sense Oligo
uacagguaggagcuaacua

SEQ ID NO: 63774 - RNA, 19 nt, Artificial Sequence
  Antisense Oligo
uaguuagcuccuaccugua

SEQ ID NO: 63775 - RNA, 19 nt, Artificial Sequence
  Sense Oligo
acagguaggagcuaacuaa

SEQ ID NO: 63776 - RNA, 19 nt, Artificial Sequence
  Antisense Oligo
uuaguuagcuccuaccugu

SEQ ID NO: 63777 - RNA, 19 nt, Artificial Sequence
  Sense Oligo
cagguaggagcuaacuaac

SEQ ID NO: 63778 - RNA, 19 nt, Artificial Sequence
  Antisense Oligo
guuaguuagcuccuaccug

SEQ ID NO: 63779 - RNA, 19 nt, Artificial Sequence
  Sense Oligo
agguaggagcuaacuaacu

SEQ ID NO: 63780 - RNA, 19 nt, Artificial Sequence
  Antisense Oligo
aguuaguuagcuccuaccu

SEQ ID NO: 63781 - RNA, 19 nt, Artificial Sequence
  Sense Oligo
gguaggagcuaacuaacuu

SEQ ID NO: 63782 - RNA, 19 nt, Artificial Sequence
  Antisense Oligo
aaguuaguuagcuccuacc

SEQ ID NO: 63783 - RNA, 19 nt, Artificial Sequence
  Sense Oligo
guaggagcuaacuaacuuc

SEQ ID NO: 63784 - RNA, 19 nt, Artificial Sequence
  Antisense Oligo
gaaguuaguuagcuccuac

SEQ ID NO: 63785 - RNA, 19 nt, Artificial Sequence
  Sense Oligo
uaggagcuaacuaacuuca

SEQ ID NO: 63786 - RNA, 19 nt, Artificial Sequence
  Antisense Oligo
ugaaguuaguuagcuccua

SEQ ID NO: 63787 - RNA, 19 nt, Artificial Sequence
  Sense Oligo
aggagcuaacuaacuucac

SEQ ID NO: 63788 - RNA, 19 nt, Artificial Sequence
  Antisense Oligo
gugaaguuaguuagcuccu

SEQ ID NO: 63789 - RNA, 19 nt, Artificial Sequence
  Sense Oligo
ggagcuaacuaacuucacc

SEQ ID NO: 63790 - RNA, 19 nt, Artificial Sequence
  Antisense Oligo
ggugaaguuaguuagcucc

SEQ ID NO: 63791 - RNA, 19 nt, Artificial Sequence
  Sense Oligo
gagcuaacuaacuucaccc

SEQ ID NO: 63792 - RNA, 19 nt, Artificial Sequence
  Antisense Oligo
gggugaaguuaguuagcuc

SEQ ID NO: 63793 - RNA, 19 nt, Artificial Sequence
  Sense Oligo
acaguaacccuuccaggag

SEQ ID NO: 63794 - RNA, 19 nt, Artificial Sequence
  Antisense Oligo
cuccuggaaggguuacugu

SEQ ID NO: 63795 - RNA, 19 nt, Artificial Sequence
  Sense Oligo
caguaacccuuccaggagc

SEQ ID NO: 63796 - RNA, 19 nt, Artificial Sequence
  Antisense Oligo
gcuccuggaaggguuacug

SEQ ID NO: 63797 - RNA, 19 nt, Artificial Sequence
  Sense Oligo
aguaacccuuccaggagcc

SEQ ID NO: 63798 - RNA, 19 nt, Artificial Sequence
  Antisense Oligo
ggcuccuggaaggguuacu

SEQ ID NO: 63799 - RNA, 19 nt, Artificial Sequence
  Sense Oligo
guaacccuuccaggagccc

SEQ ID NO: 63800 - RNA, 19 nt, Artificial Sequence
  Antisense Oligo
gggcuccuggaaggguuac

SEQ ID NO: 63801 - RNA, 19 nt, Artificial Sequence
  Sense Oligo
uaacccuuccaggagccca

SEQ ID NO: 63802 - RNA, 19 nt, Artificial Sequence
  Antisense Oligo
ugggcuccuggaaggguua

SEQ ID NO: 63803 - RNA, 19 nt, Artificial Sequence
  Sense Oligo
aacccuuccaggagcccac

SEQ ID NO: 63804 - RNA, 19 nt, Artificial Sequence
  Antisense Oligo
gugggcuccuggaaggguu

SEQ ID NO: 63805 - RNA, 19 nt, Artificial Sequence
  Sense Oligo
aggagcccacugacguugg

SEQ ID NO: 63806 - RNA, 19 nt, Artificial Sequence
  Antisense Oligo
ccaacgucagugggcuccu

SEQ ID NO: 63807 - RNA, 19 nt, Artificial Sequence
  Sense Oligo
ggagcccacugacguugga

SEQ ID NO: 63808 - RNA, 19 nt, Artificial Sequence
  Antisense Oligo
uccaacgucagugggcucc

SEQ ID NO: 63809 - RNA, 19 nt, Artificial Sequence
  Sense Oligo
gagcccacugacguuggag

SEQ ID NO: 63810 - RNA, 19 nt, Artificial Sequence
  Antisense Oligo
cuccaacgucagugggcuc

SEQ ID NO: 63811 - RNA, 19 nt, Artificial Sequence
  Sense Oligo
acugacguuggagugcuaa

SEQ ID NO: 63812 - RNA, 19 nt, Artificial Sequence
  Antisense Oligo
uuagcacuccaacgucagu

SEQ ID NO: 63813 - RNA, 19 nt, Artificial Sequence
  Sense Oligo
cugacguuggagugcuaaa

SEQ ID NO: 63814 - RNA, 19 nt, Artificial Sequence
  Antisense Oligo
uuuagcacuccaacgucag

SEQ ID NO: 63815 - RNA, 19 nt, Artificial Sequence
  Sense Oligo
ugacguuggagugcuaaaa

SEQ ID NO: 63816 - RNA, 19 nt, Artificial Sequence
  Antisense Oligo
uuuuagcacuccaacguca

SEQ ID NO: 63817 - RNA, 19 nt, Artificial Sequence
  Sense Oligo
aaagguucuuccaggcgag

SEQ ID NO: 63818 - RNA, 19 nt, Artificial Sequence
  Antisense Oligo
cucgccuggaagaaccuuu

SEQ ID NO: 63819 - RNA, 19 nt, Artificial Sequence
  Sense Oligo
aaccacagcaagaagagga

SEQ ID NO: 63820 - RNA, 19 nt, Artificial Sequence
  Antisense Oligo
uccucuucuugcugugguu

SEQ ID NO: 63821 - RNA, 19 nt, Artificial Sequence
  Sense Oligo
accacagcaagaagaggag

SEQ ID NO: 63822 - RNA, 19 nt, Artificial Sequence
  Antisense Oligo
cuccucuucuugcuguggu

SEQ ID NO: 63823 - RNA, 19 nt, Artificial Sequence
  Sense Oligo
ccacagcaagaagaggagg

SEQ ID NO: 63824 - RNA, 19 nt, Artificial Sequence
  Antisense Oligo
ccuccucuucuugcugugg

SEQ ID NO: 63825 - RNA, 19 nt, Artificial Sequence
  Sense Oligo
cacagcaagaagaggaggc

SEQ ID NO: 63826 - RNA, 19 nt, Artificial Sequence
  Antisense Oligo
gccuccucuucuugcugug

SEQ ID NO: 63827 - RNA, 19 nt, Artificial Sequence
  Sense Oligo
acagcaagaagaggaggca

SEQ ID NO: 63828 - RNA, 19 nt, Artificial Sequence
  Antisense Oligo
ugccuccucuucuugcugu

SEQ ID NO: 63829 - RNA, 19 nt, Artificial Sequence
  Sense Oligo
caagaagaggaggcaugcu

SEQ ID NO: 63830 - RNA, 19 nt, Artificial Sequence
  Antisense Oligo
agcaugccuccucuucuug

SEQ ID NO: 63831 - RNA, 19 nt, Artificial Sequence
  Sense Oligo
aagaagaggaggcaugcug

SEQ ID NO: 63832 - RNA, 19 nt, Artificial Sequence
  Antisense Oligo
cagcaugccuccucuucuu

SEQ ID NO: 63833 - RNA, 19 nt, Artificial Sequence
  Sense Oligo
augcuggccugcaccggaa

SEQ ID NO: 63834 - RNA, 19 nt, Artificial Sequence
  Antisense Oligo
uuccggugcaggccagcau

SEQ ID NO: 63835 - RNA, 19 nt, Artificial Sequence
  Sense Oligo
uggccugcaccggaagacu

SEQ ID NO: 63836 - RNA, 19 nt, Artificial Sequence
  Antisense Oligo
agucuuccggugcaggcca

SEQ ID NO: 63837 - RNA, 19 nt, Artificial Sequence
  Sense Oligo
gccugcaccggaagacuca

SEQ ID NO: 63838 - RNA, 19 nt, Artificial Sequence
  Antisense Oligo
ugagucuuccggugcaggc

SEQ ID NO: 63839 - RNA, 19 nt, Artificial Sequence
  Sense Oligo
ccugcaccggaagacucac

SEQ ID NO: 63840 - RNA, 19 nt, Artificial Sequence
  Antisense Oligo
gugagucuuccggugcagg

SEQ ID NO: 63841 - RNA, 19 nt, Artificial Sequence
  Sense Oligo
cugcaccggaagacucacu

SEQ ID NO: 63842 - RNA, 19 nt, Artificial Sequence
  Antisense Oligo
agugagucuuccggugcag

SEQ ID NO: 63843 - RNA, 19 nt, Artificial Sequence
  Sense Oligo
ugcaccggaagacucacuu

SEQ ID NO: 63844 - RNA, 19 nt, Artificial Sequence
  Antisense Oligo
aagugagucuuccggugca

SEQ ID NO: 63845 - RNA, 19 nt, Artificial Sequence
  Sense Oligo
ccggaagacucacuuuguc

SEQ ID NO: 63846 - RNA, 19 nt, Artificial Sequence
  Antisense Oligo
gacaaagugagucuuccgg

SEQ ID NO: 63847 - RNA, 19 nt, Artificial Sequence
  Sense Oligo
gacucacuuugucugcccu

SEQ ID NO: 63848 - RNA, 19 nt, Artificial Sequence
  Antisense Oligo
agggcagacaaagugaguc

SEQ ID NO: 63849 - RNA, 19 nt, Artificial Sequence
  Sense Oligo
acucacuuugucugcccug

SEQ ID NO: 63850 - RNA, 19 nt, Artificial Sequence
  Antisense Oligo
cagggcagacaaagugagu

SEQ ID NO: 63851 - RNA, 19 nt, Artificial Sequence
  Sense Oligo
acuuugucugcccugcgcc

SEQ ID NO: 63852 - RNA, 19 nt, Artificial Sequence
  Antisense Oligo
ggcgcagggcagacaaagu

SEQ ID NO: 63853 - RNA, 19 nt, Artificial Sequence
  Sense Oligo
cuuugucugcccugcgcca

SEQ ID NO: 63854 - RNA, 19 nt, Artificial Sequence
  Antisense Oligo
uggcgcagggcagacaaag

SEQ ID NO: 63855 - RNA, 19 nt, Artificial Sequence
  Sense Oligo
uuugucugcccugcgccag

SEQ ID NO: 63856 - RNA, 19 nt, Artificial Sequence
  Antisense Oligo
cuggcgcagggcagacaaa

SEQ ID NO: 63857 - RNA, 19 nt, Artificial Sequence
  Sense Oligo
caccucacccugcaguucc

SEQ ID NO: 63858 - RNA, 19 nt, Artificial Sequence
  Antisense Oligo
ggaacugcagggugaggug

SEQ ID NO: 63859 - RNA, 19 nt, Artificial Sequence
  Sense Oligo
ucacccugcaguucccguu

SEQ ID NO: 63860 - RNA, 19 nt, Artificial Sequence
  Antisense Oligo
aacgggaacugcaggguga

SEQ ID NO: 63861 - RNA, 19 nt, Artificial Sequence
  Sense Oligo
cacccugcaguucccguuu

SEQ ID NO: 63862 - RNA, 19 nt, Artificial Sequence
  Antisense Oligo
aaacgggaacugcagggug

SEQ ID NO: 63863 - RNA, 19 nt, Artificial Sequence
  Sense Oligo
acccugcaguucccguuuc

SEQ ID NO: 63864 - RNA, 19 nt, Artificial Sequence
  Antisense Oligo
gaaacgggaacugcagggu

SEQ ID NO: 63865 - RNA, 19 nt, Artificial Sequence
  Sense Oligo
cccugcaguucccguuucc

SEQ ID NO: 63866 - RNA, 19 nt, Artificial Sequence
  Antisense Oligo
ggaaacgggaacugcaggg

SEQ ID NO: 63867 - RNA, 19 nt, Artificial Sequence
  Sense Oligo
ccugcaguucccguuuccg

SEQ ID NO: 63868 - RNA, 19 nt, Artificial Sequence
  Antisense Oligo
cggaaacgggaacugcagg

SEQ ID NO: 63869 - RNA, 19 nt, Artificial Sequence
  Sense Oligo
cugcaguucccguuuccgc

SEQ ID NO: 63870 - RNA, 19 nt, Artificial Sequence
  Antisense Oligo
gcggaaacgggaacugcag

SEQ ID NO: 63871 - RNA, 19 nt, Artificial Sequence
  Sense Oligo
uucccguuuccgccaugga

SEQ ID NO: 63872 - RNA, 19 nt, Artificial Sequence
  Antisense Oligo
uccauggcggaaacgggaa

SEQ ID NO: 63873 - RNA, 19 nt, Artificial Sequence
  Sense Oligo
ucccguuuccgccauggau

SEQ ID NO: 63874 - RNA, 19 nt, Artificial Sequence
  Antisense Oligo
auccauggcggaaacggga

SEQ ID NO: 63875 - RNA, 19 nt, Artificial Sequence
  Sense Oligo
cccguuuccgccauggaug

SEQ ID NO: 63876 - RNA, 19 nt, Artificial Sequence
  Antisense Oligo
cauccauggcggaaacggg

SEQ ID NO: 63877 - RNA, 19 nt, Artificial Sequence
  Sense Oligo
ccucccaacccuuuauuca

SEQ ID NO: 63878 - RNA, 19 nt, Artificial Sequence
  Antisense Oligo
ugaauaaaggguugggagg

SEQ ID NO: 63879 - RNA, 19 nt, Artificial Sequence
  Sense Oligo
cucccaacccuuuauucau

SEQ ID NO: 63880 - RNA, 19 nt, Artificial Sequence
  Antisense Oligo
augaauaaaggguugggag

SEQ ID NO: 63881 - RNA, 19 nt, Artificial Sequence
  Sense Oligo
ucccaacccuuuauucauc

SEQ ID NO: 63882 - RNA, 19 nt, Artificial Sequence
  Antisense Oligo
gaugaauaaaggguuggga

SEQ ID NO: 63883 - RNA, 19 nt, Artificial Sequence
  Sense Oligo
cccaacccuuuauucaucc

SEQ ID NO: 63884 - RNA, 19 nt, Artificial Sequence
  Antisense Oligo
ggaugaauaaaggguuggg

SEQ ID NO: 63885 - RNA, 19 nt, Artificial Sequence
  Sense Oligo
ccaacccuuuauucauccu

SEQ ID NO: 63886 - RNA, 19 nt, Artificial Sequence
  Antisense Oligo
aggaugaauaaaggguugg

SEQ ID NO: 63887 - RNA, 19 nt, Artificial Sequence
  Sense Oligo
caacccuuuauucauccuc

SEQ ID NO: 63888 - RNA, 19 nt, Artificial Sequence
  Antisense Oligo
gaggaugaauaaaggguug

SEQ ID NO: 63889 - RNA, 19 nt, Artificial Sequence
  Sense Oligo
ccuuuauucauccucacuc

SEQ ID NO: 63890 - RNA, 19 nt, Artificial Sequence
  Antisense Oligo
gagugaggaugaauaaagg

SEQ ID NO: 63891 - RNA, 19 nt, Artificial Sequence
  Sense Oligo
uucauccucacucccacuc

SEQ ID NO: 63892 - RNA, 19 nt, Artificial Sequence
  Antisense Oligo
gagugggagugaggaugaa

SEQ ID NO: 63893 - RNA, 19 nt, Artificial Sequence
  Sense Oligo
ccucacucccacucauacc

SEQ ID NO: 63894 - RNA, 19 nt, Artificial Sequence
  Antisense Oligo
gguaugagugggagugagg

SEQ ID NO: 63895 - RNA, 19 nt, Artificial Sequence
  Sense Oligo
cucacucccacucauaccc

SEQ ID NO: 63896 - RNA, 19 nt, Artificial Sequence
  Antisense Oligo
ggguaugagugggagugag

SEQ ID NO: 63897 - RNA, 19 nt, Artificial Sequence
  Sense Oligo
caguucccugcugcagagu

SEQ ID NO: 63898 - RNA, 19 nt, Artificial Sequence
  Antisense Oligo
acucugcagcagggaacug

SEQ ID NO: 63899 - RNA, 19 nt, Artificial Sequence
  Sense Oligo
aguucccugcugcagaguu

SEQ ID NO: 63900 - RNA, 19 nt, Artificial Sequence
  Antisense Oligo
aacucugcagcagggaacu

SEQ ID NO: 63901 - RNA, 19 nt, Artificial Sequence
  Sense Oligo
guucccugcugcagaguuc

SEQ ID NO: 63902 - RNA, 19 nt, Artificial Sequence
  Antisense Oligo
gaacucugcagcagggaac

SEQ ID NO: 63903 - RNA, 19 nt, Artificial Sequence
  Sense Oligo
uucccugcugcagaguucu

SEQ ID NO: 63904 - RNA, 19 nt, Artificial Sequence
  Antisense Oligo
agaacucugcagcagggaa

SEQ ID NO: 63905 - RNA, 19 nt, Artificial Sequence
  Sense Oligo
ucccugcugcagaguucuu

SEQ ID NO: 63906 - RNA, 19 nt, Artificial Sequence
  Antisense Oligo
aagaacucugcagcaggga

SEQ ID NO: 63907 - RNA, 19 nt, Artificial Sequence
  Sense Oligo
guucuuucugcuuucagcc

SEQ ID NO: 63908 - RNA, 19 nt, Artificial Sequence
  Antisense Oligo
ggcugaaagcagaaagaac

SEQ ID NO: 63909 - RNA, 19 nt, Artificial Sequence
  Sense Oligo
uucuuucugcuuucagccc

SEQ ID NO: 63910 - RNA, 19 nt, Artificial Sequence
  Antisense Oligo
gggcugaaagcagaaagaa

SEQ ID NO: 63911 - RNA, 19 nt, Artificial Sequence
  Sense Oligo
ucuuucugcuuucagcccu

SEQ ID NO: 63912 - RNA, 19 nt, Artificial Sequence
  Antisense Oligo
agggcugaaagcagaaaga

SEQ ID NO: 63913 - RNA, 19 nt, Artificial Sequence
  Sense Oligo
cuuucugcuuucagcccua

SEQ ID NO: 63914 - RNA, 19 nt, Artificial Sequence
  Antisense Oligo
uagggcugaaagcagaaag

SEQ ID NO: 63915 - RNA, 19 nt, Artificial Sequence
  Sense Oligo
uuucugcuuucagcccuac

SEQ ID NO: 63916 - RNA, 19 nt, Artificial Sequence
  Antisense Oligo
guagggcugaaagcagaaa

SEQ ID NO: 63917 - RNA, 19 nt, Artificial Sequence
  Sense Oligo
uucugcuuucagcccuacc

SEQ ID NO: 63918 - RNA, 19 nt, Artificial Sequence
  Antisense Oligo
gguagggcugaaagcagaa

SEQ ID NO: 63919 - RNA, 19 nt, Artificial Sequence
  Sense Oligo
gcuuucagcccuaccuugg

SEQ ID NO: 63920 - RNA, 19 nt, Artificial Sequence
  Antisense Oligo
ccaagguagggcugaaagc

SEQ ID NO: 63921 - RNA, 19 nt, Artificial Sequence
  Sense Oligo
cuuucagcccuaccuuggu

SEQ ID NO: 63922 - RNA, 19 nt, Artificial Sequence
  Antisense Oligo
accaagguagggcugaaag

SEQ ID NO: 63923 - RNA, 19 nt, Artificial Sequence
  Sense Oligo
uuucagcccuaccuuggug

SEQ ID NO: 63924 - RNA, 19 nt, Artificial Sequence
  Antisense Oligo
caccaagguagggcugaaa

SEQ ID NO: 63925 - RNA, 19 nt, Artificial Sequence
  Sense Oligo
uucagcccuaccuuggugg

SEQ ID NO: 63926 - RNA, 19 nt, Artificial Sequence
  Antisense Oligo
ccaccaagguagggcugaa

SEQ ID NO: 63927 - RNA, 19 nt, Artificial Sequence
  Sense Oligo
ucagcccuaccuugguggu

SEQ ID NO: 63928 - RNA, 19 nt, Artificial Sequence
  Antisense Oligo
accaccaagguagggcuga

SEQ ID NO: 63929 - RNA, 19 nt, Artificial Sequence
  Sense Oligo
cagcccuaccuugguggug

SEQ ID NO: 63930 - RNA, 19 nt, Artificial Sequence
  Antisense Oligo
caccaccaagguagggcug

SEQ ID NO: 63931 - RNA, 19 nt, Artificial Sequence
  Sense Oligo
agcccuaccuuggugguga

SEQ ID NO: 63932 - RNA, 19 nt, Artificial Sequence
  Antisense Oligo
ucaccaccaagguagggcu

SEQ ID NO: 63933 - RNA, 19 nt, Artificial Sequence
  Sense Oligo
gcccuaccuugguggugau

SEQ ID NO: 63934 - RNA, 19 nt, Artificial Sequence
  Antisense Oligo
aucaccaccaagguagggc

SEQ ID NO: 63935 - RNA, 19 nt, Artificial Sequence
  Sense Oligo
accuugguggugauuuacc

SEQ ID NO: 63936 - RNA, 19 nt, Artificial Sequence
  Antisense Oligo
gguaaaucaccaccaaggu

SEQ ID NO: 63937 - RNA, 19 nt, Artificial Sequence
  Sense Oligo
caacugaucauuaucuccu

SEQ ID NO: 63938 - RNA, 19 nt, Artificial Sequence
  Antisense Oligo
aggagauaaugaucaguug

SEQ ID NO: 63939 - RNA, 19 nt, Artificial Sequence
  Sense Oligo
aacugaucauuaucuccuu

SEQ ID NO: 63940 - RNA, 19 nt, Artificial Sequence
  Antisense Oligo
aaggagauaaugaucaguu

SEQ ID NO: 63941 - RNA, 19 nt, Artificial Sequence
  Sense Oligo
acugaucauuaucuccuuc

SEQ ID NO: 63942 - RNA, 19 nt, Artificial Sequence
  Antisense Oligo
gaaggagauaaugaucagu

SEQ ID NO: 63943 - RNA, 19 nt, Artificial Sequence
  Sense Oligo
cugaucauuaucuccuucu

SEQ ID NO: 63944 - RNA, 19 nt, Artificial Sequence
  Antisense Oligo
agaaggagauaaugaucag

SEQ ID NO: 63945 - RNA, 19 nt, Artificial Sequence
  Sense Oligo
gugugcacaccuguaaucc

SEQ ID NO: 63946 - RNA, 19 nt, Artificial Sequence
  Antisense Oligo
ggauuacaggugugcacac

SEQ ID NO: 63947 - RNA, 19 nt, Artificial Sequence
  Sense Oligo
ugugcacaccuguaauccc

SEQ ID NO: 63948 - RNA, 19 nt, Artificial Sequence
  Antisense Oligo
gggauuacaggugugcaca

SEQ ID NO: 63949 - RNA, 19 nt, Artificial Sequence
  Sense Oligo
acaccuguaaucccagcua

SEQ ID NO: 63950 - RNA, 19 nt, Artificial Sequence
  Antisense Oligo
uagcugggauuacaggugu

SEQ ID NO: 63951 - RNA, 19 nt, Artificial Sequence
  Sense Oligo
caccuguaaucccagcuac

SEQ ID NO: 63952 - RNA, 19 nt, Artificial Sequence
  Antisense Oligo
guagcugggauuacaggug

SEQ ID NO: 63953 - RNA, 19 nt, Artificial Sequence
  Sense Oligo
accuguaaucccagcuacc

SEQ ID NO: 63954 - RNA, 19 nt, Artificial Sequence
  Antisense Oligo
gguagcugggauuacaggu

SEQ ID NO: 63955 - RNA, 19 nt, Artificial Sequence
  Sense Oligo
gggaggcugagguaugagg

SEQ ID NO: 63956 - RNA, 19 nt, Artificial Sequence
  Antisense Oligo
ccucauaccucagccuccc

SEQ ID NO: 63957 - RNA, 19 nt, Artificial Sequence
  Sense Oligo
gguaugaggauugcuugag

SEQ ID NO: 63958 - RNA, 19 nt, Artificial Sequence
  Antisense Oligo
cucaagcaauccucauacc

SEQ ID NO: 63959 - RNA, 19 nt, Artificial Sequence
  Sense Oligo
guaugaggauugcuugagc

SEQ ID NO: 63960 - RNA, 19 nt, Artificial Sequence
  Antisense Oligo
gcucaagcaauccucauac

SEQ ID NO: 63961 - RNA, 19 nt, Artificial Sequence
  Sense Oligo
ggauugcuugagccuggga

SEQ ID NO: 63962 - RNA, 19 nt, Artificial Sequence
  Antisense Oligo
ucccaggcucaagcaaucc

SEQ ID NO: 63963 - RNA, 19 nt, Artificial Sequence
  Sense Oligo
cuugagccugggaguuuga

SEQ ID NO: 63964 - RNA, 19 nt, Artificial Sequence
  Antisense Oligo
ucaaacucccaggcucaag

SEQ ID NO: 63965 - RNA, 19 nt, Artificial Sequence
  Sense Oligo
uuugaggcugcagugagcu

SEQ ID NO: 63966 - RNA, 19 nt, Artificial Sequence
  Antisense Oligo
agcucacugcagccucaaa

SEQ ID NO: 63967 - RNA, 19 nt, Artificial Sequence
  Sense Oligo
uugaggcugcagugagcua

SEQ ID NO: 63968 - RNA, 19 nt, Artificial Sequence
  Antisense Oligo
uagcucacugcagccucaa

SEQ ID NO: 63969 - RNA, 19 nt, Artificial Sequence
  Sense Oligo
ugaggcugcagugagcuau

SEQ ID NO: 63970 - RNA, 19 nt, Artificial Sequence
  Antisense Oligo
auagcucacugcagccuca

SEQ ID NO: 63971 - RNA, 19 nt, Artificial Sequence
  Sense Oligo
gaggcugcagugagcuaug

SEQ ID NO: 63972 - RNA, 19 nt, Artificial Sequence
  Antisense Oligo
cauagcucacugcagccuc

SEQ ID NO: 63973 - RNA, 19 nt, Artificial Sequence
  Sense Oligo
ugcagugagcuaugauugc

SEQ ID NO: 63974 - RNA, 19 nt, Artificial Sequence
  Antisense Oligo
gcaaucauagcucacugca

SEQ ID NO: 63975 - RNA, 19 nt, Artificial Sequence
  Sense Oligo
gcagugagcuaugauugca

SEQ ID NO: 63976 - RNA, 19 nt, Artificial Sequence
  Antisense Oligo
ugcaaucauagcucacugc

SEQ ID NO: 63977 - RNA, 19 nt, Artificial Sequence
  Sense Oligo
uccaaccugggugacagag

SEQ ID NO: 63978 - RNA, 19 nt, Artificial Sequence
  Antisense Oligo
cucugucacccagguugga

SEQ ID NO: 63979 - RNA, 19 nt, Artificial Sequence
  Sense Oligo
ccaaccugggugacagagu

SEQ ID NO: 63980 - RNA, 19 nt, Artificial Sequence
  Antisense Oligo
acucugucacccagguugg

SEQ ID NO: 63981 - RNA, 19 nt, Artificial Sequence
  Sense Oligo
caaccugggugacagagug

SEQ ID NO: 63982 - RNA, 19 nt, Artificial Sequence
  Antisense Oligo
cacucugucacccagguug

SEQ ID NO: 63983 - RNA, 19 nt, Artificial Sequence
  Sense Oligo
aaccugggugacagaguga

SEQ ID NO: 63984 - RNA, 19 nt, Artificial Sequence
  Antisense Oligo
ucacucugucacccagguu

SEQ ID NO: 63985 - RNA, 19 nt, Artificial Sequence
  Sense Oligo
accugggugacagagugag

SEQ ID NO: 63986 - RNA, 19 nt, Artificial Sequence
  Antisense Oligo
cucacucugucacccaggu

SEQ ID NO: 63987 - RNA, 19 nt, Artificial Sequence
  Sense Oligo
ggaccuuauugugugugca

SEQ ID NO: 63988 - RNA, 19 nt, Artificial Sequence
  Antisense Oligo
ugcacacacaauaaggucc

SEQ ID NO: 63989 - RNA, 19 nt, Artificial Sequence
  Sense Oligo
gaccuuauugugugugcaa

SEQ ID NO: 63990 - RNA, 19 nt, Artificial Sequence
  Antisense Oligo
uugcacacacaauaagguc

SEQ ID NO: 63991 - RNA, 19 nt, Artificial Sequence
  Sense Oligo
accuuauugugugugcaaa

SEQ ID NO: 63992 - RNA, 19 nt, Artificial Sequence
  Antisense Oligo
uuugcacacacaauaaggu

SEQ ID NO: 63993 - RNA, 19 nt, Artificial Sequence
  Sense Oligo
ccuuauugugugugcaaau

SEQ ID NO: 63994 - RNA, 19 nt, Artificial Sequence
  Antisense Oligo
auuugcacacacaauaagg

SEQ ID NO: 63995 - RNA, 19 nt, Artificial Sequence
  Sense Oligo
cuuauugugugugcaaauu

SEQ ID NO: 63996 - RNA, 19 nt, Artificial Sequence
  Antisense Oligo
aauuugcacacacaauaag

SEQ ID NO: 63997 - RNA, 19 nt, Artificial Sequence
  Sense Oligo
ugccuuucaugaauaguua

SEQ ID NO: 63998 - RNA, 19 nt, Artificial Sequence
  Antisense Oligo
uaacuauucaugaaaggca

SEQ ID NO: 63999 - RNA, 19 nt, Artificial Sequence
  Sense Oligo
ccuuucaugaauaguuaug

SEQ ID NO: 64000 - RNA, 19 nt, Artificial Sequence
  Antisense Oligo
cauaacuauucaugaaagg

SEQ ID NO: 64001 - RNA, 19 nt, Artificial Sequence
  Sense Oligo
agacuuugugcauguguua

SEQ ID NO: 64002 - RNA, 19 nt, Artificial Sequence
  Antisense Oligo
uaacacaugcacaaagucu

SEQ ID NO: 64003 - RNA, 19 nt, Artificial Sequence
  Sense Oligo
gacuuugugcauguguuaa

SEQ ID NO: 64004 - RNA, 19 nt, Artificial Sequence
  Antisense Oligo
uuaacacaugcacaaaguc

SEQ ID NO: 64005 - RNA, 19 nt, Artificial Sequence
  Sense Oligo
cuuugugcauguguuaacc

SEQ ID NO: 64006 - RNA, 19 nt, Artificial Sequence
  Antisense Oligo
gguuaacacaugcacaaag

SEQ ID NO: 64007 - RNA, 19 nt, Artificial Sequence
  Sense Oligo
ugagcuauuucaguuacuc

SEQ ID NO: 64008 - RNA, 19 nt, Artificial Sequence
  Antisense Oligo
gaguaacugaaauagcuca

SEQ ID NO: 64009 - RNA, 19 nt, Artificial Sequence
  Sense Oligo
agcuauuucaguuacuccu

SEQ ID NO: 64010 - RNA, 19 nt, Artificial Sequence
  Antisense Oligo
aggaguaacugaaauagcu

SEQ ID NO: 64011 - RNA, 19 nt, Artificial Sequence
  Sense Oligo
gcuauuucaguuacuccug

SEQ ID NO: 64012 - RNA, 19 nt, Artificial Sequence
  Antisense Oligo
caggaguaacugaaauagc

SEQ ID NO: 64013 - RNA, 19 nt, Artificial Sequence
  Sense Oligo
cuauuucaguuacuccugu

SEQ ID NO: 64014 - RNA, 19 nt, Artificial Sequence
  Antisense Oligo
acaggaguaacugaaauag

SEQ ID NO: 64015 - RNA, 19 nt, Artificial Sequence
  Sense Oligo
uuucaguuacuccuguaug

SEQ ID NO: 64016 - RNA, 19 nt, Artificial Sequence
  Antisense Oligo
cauacaggaguaacugaaa

SEQ ID NO: 64017 - RNA, 19 nt, Artificial Sequence
  Sense Oligo
uucaguuacuccuguaugu

SEQ ID NO: 64018 - RNA, 19 nt, Artificial Sequence
  Antisense Oligo
acauacaggaguaacugaa

SEQ ID NO: 64019 - RNA, 19 nt, Artificial Sequence
  Sense Oligo
ucaguuacuccuguauguu

SEQ ID NO: 64020 - RNA, 19 nt, Artificial Sequence
  Antisense Oligo
aacauacaggaguaacuga

SEQ ID NO: 64021 - RNA, 19 nt, Artificial Sequence
  Sense Oligo
caguuacuccuguauguuc

SEQ ID NO: 64022 - RNA, 19 nt, Artificial Sequence
  Antisense Oligo
gaacauacaggaguaacug

SEQ ID NO: 64023 - RNA, 19 nt, Artificial Sequence
  Sense Oligo
aguuacuccuguauguuca

SEQ ID NO: 64024 - RNA, 19 nt, Artificial Sequence
  Antisense Oligo
ugaacauacaggaguaacu

SEQ ID NO: 64025 - RNA, 19 nt, Artificial Sequence
  Sense Oligo
guuacuccuguauguucag

SEQ ID NO: 64026 - RNA, 19 nt, Artificial Sequence
  Antisense Oligo
cugaacauacaggaguaac

SEQ ID NO: 64027 - RNA, 19 nt, Artificial Sequence
  Sense Oligo
uauguucaggcaauuccaa

SEQ ID NO: 64028 - RNA, 19 nt, Artificial Sequence
  Antisense Oligo
uuggaauugccugaacaua

SEQ ID NO: 64029 - RNA, 19 nt, Artificial Sequence
  Sense Oligo
cagugauaaauauugggaa

SEQ ID NO: 64030 - RNA, 19 nt, Artificial Sequence
  Antisense Oligo
uucccaauauuuaucacug

SEQ ID NO: 64031 - RNA, 19 nt, Artificial Sequence
  Sense Oligo
agugauaaauauugggaag

SEQ ID NO: 64032 - RNA, 19 nt, Artificial Sequence
  Antisense Oligo
cuucccaauauuuaucacu

SEQ ID NO: 64033 - RNA, 19 nt, Artificial Sequence
  Sense Oligo
gugauaaauauugggaaga

SEQ ID NO: 64034 - RNA, 19 nt, Artificial Sequence
  Antisense Oligo
ucuucccaauauuuaucac

SEQ ID NO: 64035 - RNA, 19 nt, Artificial Sequence
  Sense Oligo
ugucagcucagggccaagu

SEQ ID NO: 64036 - RNA, 19 nt, Artificial Sequence
  Antisense Oligo
acuuggcccugagcugaca

SEQ ID NO: 64037 - RNA, 19 nt, Artificial Sequence
  Sense Oligo
gucagcucagggccaagua

SEQ ID NO: 64038 - RNA, 19 nt, Artificial Sequence
  Antisense Oligo
uacuuggcccugagcugac

SEQ ID NO: 64039 - RNA, 19 nt, Artificial Sequence
  Sense Oligo
ucagcucagggccaaguag

SEQ ID NO: 64040 - RNA, 19 nt, Artificial Sequence
  Antisense Oligo
cuacuuggcccugagcuga

SEQ ID NO: 64041 - RNA, 19 nt, Artificial Sequence
  Sense Oligo
cagcucagggccaaguagg

SEQ ID NO: 64042 - RNA, 19 nt, Artificial Sequence
  Antisense Oligo
ccuacuuggcccugagcug

SEQ ID NO: 64043 - RNA, 19 nt, Artificial Sequence
  Sense Oligo
agcucagggccaaguaggu

SEQ ID NO: 64044 - RNA, 19 nt, Artificial Sequence
  Antisense Oligo
accuacuuggcccugagcu

SEQ ID NO: 64045 - RNA, 19 nt, Artificial Sequence
  Sense Oligo
gcucagggccaaguaggua

SEQ ID NO: 64046 - RNA, 19 nt, Artificial Sequence
  Antisense Oligo
uaccuacuuggcccugagc

SEQ ID NO: 64047 - RNA, 19 nt, Artificial Sequence
  Sense Oligo
ucagggccaaguagguaaa

SEQ ID NO: 64048 - RNA, 19 nt, Artificial Sequence
  Antisense Oligo
uuuaccuacuuggcccuga

SEQ ID NO: 64049 - RNA, 19 nt, Artificial Sequence
  Sense Oligo
cagggccaaguagguaaag

SEQ ID NO: 64050 - RNA, 19 nt, Artificial Sequence
  Antisense Oligo
cuuuaccuacuuggcccug

SEQ ID NO: 64051 - RNA, 19 nt, Artificial Sequence
  Sense Oligo
agggccaaguagguaaagc

SEQ ID NO: 64052 - RNA, 19 nt, Artificial Sequence
  Antisense Oligo
gcuuuaccuacuuggcccu

SEQ ID NO: 64053 - RNA, 19 nt, Artificial Sequence
  Sense Oligo
gggccaaguagguaaagcc

SEQ ID NO: 64054 - RNA, 19 nt, Artificial Sequence
  Antisense Oligo
ggcuuuaccuacuuggccc

SEQ ID NO: 64055 - RNA, 19 nt, Artificial Sequence
  Sense Oligo
ccaaguagguaaagccacc

SEQ ID NO: 64056 - RNA, 19 nt, Artificial Sequence
  Antisense Oligo
gguggcuuuaccuacuugg

SEQ ID NO: 64057 - RNA, 19 nt, Artificial Sequence
  Sense Oligo
guagguaaagccacccaag

SEQ ID NO: 64058 - RNA, 19 nt, Artificial Sequence
  Antisense Oligo
cuuggguggcuuuaccuac

SEQ ID NO: 64059 - RNA, 19 nt, Artificial Sequence
  Sense Oligo
uagguaaagccacccaagu

SEQ ID NO: 64060 - RNA, 19 nt, Artificial Sequence
  Antisense Oligo
acuuggguggcuuuaccua

SEQ ID NO: 64061 - RNA, 19 nt, Artificial Sequence
  Sense Oligo
agguaaagccacccaaguc

SEQ ID NO: 64062 - RNA, 19 nt, Artificial Sequence
  Antisense Oligo
gacuuggguggcuuuaccu

SEQ ID NO: 64063 - RNA, 19 nt, Artificial Sequence
  Sense Oligo
gguaaagccacccaagucu

SEQ ID NO: 64064 - RNA, 19 nt, Artificial Sequence
  Antisense Oligo
agacuuggguggcuuuacc

SEQ ID NO: 64065 - RNA, 19 nt, Artificial Sequence
  Sense Oligo
aagccacccaagucuagcc

SEQ ID NO: 64066 - RNA, 19 nt, Artificial Sequence
  Antisense Oligo
ggcuagacuuggguggcuu

SEQ ID NO: 64067 - RNA, 19 nt, Artificial Sequence
  Sense Oligo
agccacccaagucuagcca

SEQ ID NO: 64068 - RNA, 19 nt, Artificial Sequence
  Antisense Oligo
uggcuagacuuggguggcu

SEQ ID NO: 64069 - RNA, 19 nt, Artificial Sequence
  Sense Oligo
acccaagucuagccaugca

SEQ ID NO: 64070 - RNA, 19 nt, Artificial Sequence
  Antisense Oligo
ugcauggcuagacuugggu

SEQ ID NO: 64071 - RNA, 19 nt, Artificial Sequence
  Sense Oligo
cccaagucuagccaugcac

SEQ ID NO: 64072 - RNA, 19 nt, Artificial Sequence
  Antisense Oligo
gugcauggcuagacuuggg

SEQ ID NO: 64073 - RNA, 19 nt, Artificial Sequence
  Sense Oligo
ccaagucuagccaugcaca

SEQ ID NO: 64074 - RNA, 19 nt, Artificial Sequence
  Antisense Oligo
ugugcauggcuagacuugg

SEQ ID NO: 64075 - RNA, 19 nt, Artificial Sequence
  Sense Oligo
caagucuagccaugcacac

SEQ ID NO: 64076 - RNA, 19 nt, Artificial Sequence
  Antisense Oligo
gugugcauggcuagacuug

SEQ ID NO: 64077 - RNA, 19 nt, Artificial Sequence
  Sense Oligo
acaccucugauuugauaca

SEQ ID NO: 64078 - RNA, 19 nt, Artificial Sequence
  Antisense Oligo
uguaucaaaucagaggugu

SEQ ID NO: 64079 - RNA, 19 nt, Artificial Sequence
  Sense Oligo
caccucugauuugauacau

SEQ ID NO: 64080 - RNA, 19 nt, Artificial Sequence
  Antisense Oligo
auguaucaaaucagaggug

SEQ ID NO: 64081 - RNA, 19 nt, Artificial Sequence
  Sense Oligo
accucugauuugauacaua

SEQ ID NO: 64082 - RNA, 19 nt, Artificial Sequence
  Antisense Oligo
uauguaucaaaucagaggu

SEQ ID NO: 64083 - RNA, 19 nt, Artificial Sequence
  Sense Oligo
ccucugauuugauacauaa

SEQ ID NO: 64084 - RNA, 19 nt, Artificial Sequence
  Antisense Oligo
uuauguaucaaaucagagg

SEQ ID NO: 64085 - RNA, 19 nt, Artificial Sequence
  Sense Oligo
ugauacauaaagugugaag

SEQ ID NO: 64086 - RNA, 19 nt, Artificial Sequence
  Antisense Oligo
cuucacacuuuauguauca

SEQ ID NO: 64087 - RNA, 19 nt, Artificial Sequence
  Sense Oligo
acauaaagugugaagguug

SEQ ID NO: 64088 - RNA, 19 nt, Artificial Sequence
  Antisense Oligo
caaccuucacacuuuaugu

SEQ ID NO: 64089 - RNA, 19 nt, Artificial Sequence
  Sense Oligo
cauaaagugugaagguugc

SEQ ID NO: 64090 - RNA, 19 nt, Artificial Sequence
  Antisense Oligo
gcaaccuucacacuuuaug

SEQ ID NO: 64091 - RNA, 19 nt, Artificial Sequence
  Sense Oligo
auaaagugugaagguugca

SEQ ID NO: 64092 - RNA, 19 nt, Artificial Sequence
  Antisense Oligo
ugcaaccuucacacuuuau

SEQ ID NO: 64093 - RNA, 19 nt, Artificial Sequence
  Sense Oligo
uaaagugugaagguugcau

SEQ ID NO: 64094 - RNA, 19 nt, Artificial Sequence
  Antisense Oligo
augcaaccuucacacuuua

SEQ ID NO: 64095 - RNA, 19 nt, Artificial Sequence
  Sense Oligo
aaagugugaagguugcaua

SEQ ID NO: 64096 - RNA, 19 nt, Artificial Sequence
  Antisense Oligo
uaugcaaccuucacacuuu

SEQ ID NO: 64097 - RNA, 19 nt, Artificial Sequence
  Sense Oligo
aagugugaagguugcauaa

SEQ ID NO: 64098 - RNA, 19 nt, Artificial Sequence
  Antisense Oligo
uuaugcaaccuucacacuu

SEQ ID NO: 64099 - RNA, 19 nt, Artificial Sequence
  Sense Oligo
agugugaagguugcauaac

SEQ ID NO: 64100 - RNA, 19 nt, Artificial Sequence
  Antisense Oligo
guuaugcaaccuucacacu

SEQ ID NO: 64101 - RNA, 19 nt, Artificial Sequence
  Sense Oligo
gugugaagguugcauaacu

SEQ ID NO: 64102 - RNA, 19 nt, Artificial Sequence
  Antisense Oligo
aguuaugcaaccuucacac

SEQ ID NO: 64103 - RNA, 19 nt, Artificial Sequence
  Sense Oligo
aaccugagccucgagcuga

SEQ ID NO: 64104 - RNA, 19 nt, Artificial Sequence
  Antisense Oligo
ucagcucgaggcucagguu

SEQ ID NO: 64105 - RNA, 19 nt, Artificial Sequence
  Sense Oligo
gagccucgagcugaguaac

SEQ ID NO: 64106 - RNA, 19 nt, Artificial Sequence
  Antisense Oligo
guuacucagcucgaggcuc

SEQ ID NO: 64107 - RNA, 19 nt, Artificial Sequence
  Sense Oligo
auccaagccaugauuagca

SEQ ID NO: 64108 - RNA, 19 nt, Artificial Sequence
  Antisense Oligo
ugcuaaucauggcuuggau

SEQ ID NO: 64109 - RNA, 19 nt, Artificial Sequence
  Sense Oligo
uccaagccaugauuagcau

SEQ ID NO: 64110 - RNA, 19 nt, Artificial Sequence
  Antisense Oligo
augcuaaucauggcuugga

SEQ ID NO: 64111 - RNA, 19 nt, Artificial Sequence
  Sense Oligo
ccaagccaugauuagcauu

SEQ ID NO: 64112 - RNA, 19 nt, Artificial Sequence
  Antisense Oligo
aaugcuaaucauggcuugg

SEQ ID NO: 64113 - RNA, 19 nt, Artificial Sequence
  Sense Oligo
caagccaugauuagcauuu

SEQ ID NO: 64114 - RNA, 19 nt, Artificial Sequence
  Antisense Oligo
aaaugcuaaucauggcuug

SEQ ID NO: 64115 - RNA, 19 nt, Artificial Sequence
  Sense Oligo
auucugcauuauucucauc

SEQ ID NO: 64116 - RNA, 19 nt, Artificial Sequence
  Antisense Oligo
gaugagaauaaugcagaau

SEQ ID NO: 64117 - RNA, 19 nt, Artificial Sequence
  Sense Oligo
uucugcauuauucucaucc

SEQ ID NO: 64118 - RNA, 19 nt, Artificial Sequence
  Antisense Oligo
ggaugagaauaaugcagaa

SEQ ID NO: 64119 - RNA, 19 nt, Artificial Sequence
  Sense Oligo
ucugcauuauucucauccu

SEQ ID NO: 64120 - RNA, 19 nt, Artificial Sequence
  Antisense Oligo
aggaugagaauaaugcaga

SEQ ID NO: 64121 - RNA, 19 nt, Artificial Sequence
  Sense Oligo
ugcauuauucucauccuau

SEQ ID NO: 64122 - RNA, 19 nt, Artificial Sequence
  Antisense Oligo
auaggaugagaauaaugca

SEQ ID NO: 64123 - RNA, 19 nt, Artificial Sequence
  Sense Oligo
gcauuauucucauccuauc

SEQ ID NO: 64124 - RNA, 19 nt, Artificial Sequence
  Antisense Oligo
gauaggaugagaauaaugc

SEQ ID NO: 64125 - RNA, 19 nt, Artificial Sequence
  Sense Oligo
cauuauucucauccuauca

SEQ ID NO: 64126 - RNA, 19 nt, Artificial Sequence
  Antisense Oligo
ugauaggaugagaauaaug

SEQ ID NO: 64127 - RNA, 19 nt, Artificial Sequence
  Sense Oligo
auuauucucauccuaucac

SEQ ID NO: 64128 - RNA, 19 nt, Artificial Sequence
  Antisense Oligo
gugauaggaugagaauaau

SEQ ID NO: 64129 - RNA, 19 nt, Artificial Sequence
  Sense Oligo
uuauucucauccuaucacg

SEQ ID NO: 64130 - RNA, 19 nt, Artificial Sequence
  Antisense Oligo
cgugauaggaugagaauaa

SEQ ID NO: 64131 - RNA, 19 nt, Artificial Sequence
  Sense Oligo
uauucucauccuaucacgu

SEQ ID NO: 64132 - RNA, 19 nt, Artificial Sequence
  Antisense Oligo
acgugauaggaugagaaua

SEQ ID NO: 64133 - RNA, 19 nt, Artificial Sequence
  Sense Oligo
auucucauccuaucacguu

SEQ ID NO: 64134 - RNA, 19 nt, Artificial Sequence
  Antisense Oligo
aacgugauaggaugagaau

SEQ ID NO: 64135 - RNA, 19 nt, Artificial Sequence
  Sense Oligo
uucucauccuaucacguuc

SEQ ID NO: 64136 - RNA, 19 nt, Artificial Sequence
  Antisense Oligo
gaacgugauaggaugagaa

SEQ ID NO: 64137 - RNA, 19 nt, Artificial Sequence
  Sense Oligo
ucucauccuaucacguuca

SEQ ID NO: 64138 - RNA, 19 nt, Artificial Sequence
  Antisense Oligo
ugaacgugauaggaugaga

SEQ ID NO: 64139 - RNA, 19 nt, Artificial Sequence
  Sense Oligo
cucauccuaucacguucau

SEQ ID NO: 64140 - RNA, 19 nt, Artificial Sequence
  Antisense Oligo
augaacgugauaggaugag

SEQ ID NO: 64141 - RNA, 19 nt, Artificial Sequence
  Sense Oligo
ucauccuaucacguucauu

SEQ ID NO: 64142 - RNA, 19 nt, Artificial Sequence
  Antisense Oligo
aaugaacgugauaggauga

SEQ ID NO: 64143 - RNA, 19 nt, Artificial Sequence
  Sense Oligo
cauccuaucacguucauua

SEQ ID NO: 64144 - RNA, 19 nt, Artificial Sequence
  Antisense Oligo
uaaugaacgugauaggaug

SEQ ID NO: 64145 - RNA, 19 nt, Artificial Sequence
  Sense Oligo
auccuaucacguucauuaa

SEQ ID NO: 64146 - RNA, 19 nt, Artificial Sequence
  Antisense Oligo
uuaaugaacgugauaggau

SEQ ID NO: 64147 - RNA, 19 nt, Artificial Sequence
  Sense Oligo
uccuaucacguucauuaag

SEQ ID NO: 64148 - RNA, 19 nt, Artificial Sequence
  Antisense Oligo
cuuaaugaacgugauagga

SEQ ID NO: 64149 - RNA, 19 nt, Artificial Sequence
  Sense Oligo
ccuaucacguucauuaagu

SEQ ID NO: 64150 - RNA, 19 nt, Artificial Sequence
  Antisense Oligo
acuuaaugaacgugauagg

SEQ ID NO: 64151 - RNA, 19 nt, Artificial Sequence
  Sense Oligo
uaucacguucauuaaguuc

SEQ ID NO: 64152 - RNA, 19 nt, Artificial Sequence
  Antisense Oligo
gaacuuaaugaacgugaua

SEQ ID NO: 64153 - RNA, 19 nt, Artificial Sequence
  Sense Oligo
cauuaaguucaaccauuac

SEQ ID NO: 64154 - RNA, 19 nt, Artificial Sequence
  Antisense Oligo
guaaugguugaacuuaaug

SEQ ID NO: 64155 - RNA, 19 nt, Artificial Sequence
  Sense Oligo
auuaaguucaaccauuacc

SEQ ID NO: 64156 - RNA, 19 nt, Artificial Sequence
  Antisense Oligo
gguaaugguugaacuuaau

SEQ ID NO: 64157 - RNA, 19 nt, Artificial Sequence
  Sense Oligo
uuaaguucaaccauuacca

SEQ ID NO: 64158 - RNA, 19 nt, Artificial Sequence
  Antisense Oligo
ugguaaugguugaacuuaa

SEQ ID NO: 64159 - RNA, 19 nt, Artificial Sequence
  Sense Oligo
uaaguucaaccauuaccau

SEQ ID NO: 64160 - RNA, 19 nt, Artificial Sequence
  Antisense Oligo
augguaaugguugaacuua

SEQ ID NO: 64161 - RNA, 19 nt, Artificial Sequence
  Sense Oligo
aaguucaaccauuaccauu

SEQ ID NO: 64162 - RNA, 19 nt, Artificial Sequence
  Antisense Oligo
aaugguaaugguugaacuu

SEQ ID NO: 64163 - RNA, 19 nt, Artificial Sequence
  Sense Oligo
aguucaaccauuaccauua

SEQ ID NO: 64164 - RNA, 19 nt, Artificial Sequence
  Antisense Oligo
uaaugguaaugguugaacu

SEQ ID NO: 64165 - RNA, 19 nt, Artificial Sequence
  Sense Oligo
guucaaccauuaccauuac

SEQ ID NO: 64166 - RNA, 19 nt, Artificial Sequence
  Antisense Oligo
guaaugguaaugguugaac

SEQ ID NO: 64167 - RNA, 19 nt, Artificial Sequence
  Sense Oligo
uucaaccauuaccauuacg

SEQ ID NO: 64168 - RNA, 19 nt, Artificial Sequence
  Antisense Oligo
cguaaugguaaugguugaa

SEQ ID NO: 64169 - RNA, 19 nt, Artificial Sequence
  Sense Oligo
ucaaccauuaccauuacga

SEQ ID NO: 64170 - RNA, 19 nt, Artificial Sequence
  Antisense Oligo
ucguaaugguaaugguuga

SEQ ID NO: 64171 - RNA, 19 nt, Artificial Sequence
  Sense Oligo
caaccauuaccauuacgaa

SEQ ID NO: 64172 - RNA, 19 nt, Artificial Sequence
  Antisense Oligo
uucguaaugguaaugguug

SEQ ID NO: 64173 - RNA, 19 nt, Artificial Sequence
  Sense Oligo
aaccauuaccauuacgaau

SEQ ID NO: 64174 - RNA, 19 nt, Artificial Sequence
  Antisense Oligo
auucguaaugguaaugguu

SEQ ID NO: 64175 - RNA, 19 nt, Artificial Sequence
  Sense Oligo
accauuaccauuacgaauc

SEQ ID NO: 64176 - RNA, 19 nt, Artificial Sequence
  Antisense Oligo
gauucguaaugguaauggu

SEQ ID NO: 64177 - RNA, 19 nt, Artificial Sequence
  Sense Oligo
ccauuaccauuacgaaucc

SEQ ID NO: 64178 - RNA, 19 nt, Artificial Sequence
  Antisense Oligo
ggauucguaaugguaaugg

SEQ ID NO: 64179 - RNA, 19 nt, Artificial Sequence
  Sense Oligo
cauuaccauuacgaauccc

SEQ ID NO: 64180 - RNA, 19 nt, Artificial Sequence
  Antisense Oligo
gggauucguaaugguaaug

SEQ ID NO: 64181 - RNA, 19 nt, Artificial Sequence
  Sense Oligo
auuaccauuacgaaucccg

SEQ ID NO: 64182 - RNA, 19 nt, Artificial Sequence
  Antisense Oligo
cgggauucguaaugguaau

SEQ ID NO: 64183 - RNA, 19 nt, Artificial Sequence
  Sense Oligo
uuaccauuacgaaucccgu

SEQ ID NO: 64184 - RNA, 19 nt, Artificial Sequence
  Antisense Oligo
acgggauucguaaugguaa

SEQ ID NO: 64185 - RNA, 19 nt, Artificial Sequence
  Sense Oligo
uaccauuacgaaucccguu

SEQ ID NO: 64186 - RNA, 19 nt, Artificial Sequence
  Antisense Oligo
aacgggauucguaauggua

SEQ ID NO: 64187 - RNA, 19 nt, Artificial Sequence
  Sense Oligo
accauuacgaaucccguuu

SEQ ID NO: 64188 - RNA, 19 nt, Artificial Sequence
  Antisense Oligo
aaacgggauucguaauggu

SEQ ID NO: 64189 - RNA, 19 nt, Artificial Sequence
  Sense Oligo
ccauuacgaaucccguuuc

SEQ ID NO: 64190 - RNA, 19 nt, Artificial Sequence
  Antisense Oligo
gaaacgggauucguaaugg

SEQ ID NO: 64191 - RNA, 19 nt, Artificial Sequence
  Sense Oligo
cauuacgaaucccguuucc

SEQ ID NO: 64192 - RNA, 19 nt, Artificial Sequence
  Antisense Oligo
ggaaacgggauucguaaug

SEQ ID NO: 64193 - RNA, 19 nt, Artificial Sequence
  Sense Oligo
ccagagcaacuuuggucag

SEQ ID NO: 64194 - RNA, 19 nt, Artificial Sequence
  Antisense Oligo
cugaccaaaguugcucugg

SEQ ID NO: 64195 - RNA, 19 nt, Artificial Sequence
  Sense Oligo
gagcaacuuuggucagaag

SEQ ID NO: 64196 - RNA, 19 nt, Artificial Sequence
  Antisense Oligo
cuucugaccaaaguugcuc

SEQ ID NO: 64197 - RNA, 19 nt, Artificial Sequence
  Sense Oligo
ggucagaagucacaccuaa

SEQ ID NO: 64198 - RNA, 19 nt, Artificial Sequence
  Antisense Oligo
uuaggugugacuucugacc

SEQ ID NO: 64199 - RNA, 19 nt, Artificial Sequence
  Sense Oligo
gucagaagucacaccuaau

SEQ ID NO: 64200 - RNA, 19 nt, Artificial Sequence
  Antisense Oligo
auuaggugugacuucugac

SEQ ID NO: 64201 - RNA, 19 nt, Artificial Sequence
  Sense Oligo
gaagucacaccuaaucacc

SEQ ID NO: 64202 - RNA, 19 nt, Artificial Sequence
  Antisense Oligo
ggugauuaggugugacuuc

SEQ ID NO: 64203 - RNA, 19 nt, Artificial Sequence
  Sense Oligo
aagucacaccuaaucaccc

SEQ ID NO: 64204 - RNA, 19 nt, Artificial Sequence
  Antisense Oligo
gggugauuaggugugacuu

SEQ ID NO: 64205 - RNA, 19 nt, Artificial Sequence
  Sense Oligo
agucacaccuaaucacccu

SEQ ID NO: 64206 - RNA, 19 nt, Artificial Sequence
  Antisense Oligo
agggugauuaggugugacu

SEQ ID NO: 64207 - RNA, 19 nt, Artificial Sequence
  Sense Oligo
gucacaccuaaucacccuc

SEQ ID NO: 64208 - RNA, 19 nt, Artificial Sequence
  Antisense Oligo
gagggugauuaggugugac

SEQ ID NO: 64209 - RNA, 19 nt, Artificial Sequence
  Sense Oligo
ucacaccuaaucacccucu

SEQ ID NO: 64210 - RNA, 19 nt, Artificial Sequence
  Antisense Oligo
agagggugauuagguguga

SEQ ID NO: 64211 - RNA, 19 nt, Artificial Sequence
  Sense Oligo
cacaccuaaucacccucuc

SEQ ID NO: 64212 - RNA, 19 nt, Artificial Sequence
  Antisense Oligo
gagagggugauuaggugug

SEQ ID NO: 64213 - RNA, 19 nt, Artificial Sequence
  Sense Oligo
acaccuaaucacccucucu

SEQ ID NO: 64214 - RNA, 19 nt, Artificial Sequence
  Antisense Oligo
agagagggugauuaggugu

SEQ ID NO: 64215 - RNA, 19 nt, Artificial Sequence
  Sense Oligo
aucacccucucugcaggau

SEQ ID NO: 64216 - RNA, 19 nt, Artificial Sequence
  Antisense Oligo
auccugcagagagggugau

SEQ ID NO: 64217 - RNA, 19 nt, Artificial Sequence
  Sense Oligo
ucacccucucugcaggaua

SEQ ID NO: 64218 - RNA, 19 nt, Artificial Sequence
  Antisense Oligo
uauccugcagagaggguga

SEQ ID NO: 64219 - RNA, 19 nt, Artificial Sequence
  Sense Oligo
cacccucucugcaggauau

SEQ ID NO: 64220 - RNA, 19 nt, Artificial Sequence
  Antisense Oligo
auauccugcagagagggug

SEQ ID NO: 64221 - RNA, 19 nt, Artificial Sequence
  Sense Oligo
acccucucugcaggauaug

SEQ ID NO: 64222 - RNA, 19 nt, Artificial Sequence
  Antisense Oligo
cauauccugcagagagggu

SEQ ID NO: 64223 - RNA, 19 nt, Artificial Sequence
  Sense Oligo
cccucucugcaggauaugc

SEQ ID NO: 64224 - RNA, 19 nt, Artificial Sequence
  Antisense Oligo
gcauauccugcagagaggg

SEQ ID NO: 64225 - RNA, 19 nt, Artificial Sequence
  Sense Oligo
ccucucugcaggauaugcu

SEQ ID NO: 64226 - RNA, 19 nt, Artificial Sequence
  Antisense Oligo
agcauauccugcagagagg

SEQ ID NO: 64227 - RNA, 19 nt, Artificial Sequence
  Sense Oligo
cucucugcaggauaugcug

SEQ ID NO: 64228 - RNA, 19 nt, Artificial Sequence
  Antisense Oligo
cagcauauccugcagagag

SEQ ID NO: 64229 - RNA, 19 nt, Artificial Sequence
  Sense Oligo
ggauagcccuuuugaggag

SEQ ID NO: 64230 - RNA, 19 nt, Artificial Sequence
  Antisense Oligo
cuccucaaaagggcuaucc

SEQ ID NO: 64231 - RNA, 19 nt, Artificial Sequence
  Sense Oligo
gauagcccuuuugaggagg

SEQ ID NO: 64232 - RNA, 19 nt, Artificial Sequence
  Antisense Oligo
ccuccucaaaagggcuauc

SEQ ID NO: 64233 - RNA, 19 nt, Artificial Sequence
  Sense Oligo
auagcccuuuugaggaggu

SEQ ID NO: 64234 - RNA, 19 nt, Artificial Sequence
  Antisense Oligo
accuccucaaaagggcuau

SEQ ID NO: 64235 - RNA, 19 nt, Artificial Sequence
  Sense Oligo
uagcccuuuugaggaggug

SEQ ID NO: 64236 - RNA, 19 nt, Artificial Sequence
  Antisense Oligo
caccuccucaaaagggcua

SEQ ID NO: 64237 - RNA, 19 nt, Artificial Sequence
  Sense Oligo
agcccuuuugaggaggugg

SEQ ID NO: 64238 - RNA, 19 nt, Artificial Sequence
  Antisense Oligo
ccaccuccucaaaagggcu

SEQ ID NO: 64239 - RNA, 19 nt, Artificial Sequence
  Sense Oligo
gcccuuuugaggagguggg

SEQ ID NO: 64240 - RNA, 19 nt, Artificial Sequence
  Antisense Oligo
cccaccuccucaaaagggc

SEQ ID NO: 64241 - RNA, 19 nt, Artificial Sequence
  Sense Oligo
ccuggguccagcaagugcu

SEQ ID NO: 64242 - RNA, 19 nt, Artificial Sequence
  Antisense Oligo
agcacuugcuggacccagg

SEQ ID NO: 64243 - RNA, 19 nt, Artificial Sequence
  Sense Oligo
gguccagcaagugcuccac

SEQ ID NO: 64244 - RNA, 19 nt, Artificial Sequence
  Antisense Oligo
guggagcacuugcuggacc

SEQ ID NO: 64245 - RNA, 19 nt, Artificial Sequence
  Sense Oligo
guccagcaagugcuccacc

SEQ ID NO: 64246 - RNA, 19 nt, Artificial Sequence
  Antisense Oligo
gguggagcacuugcuggac

SEQ ID NO: 64247 - RNA, 19 nt, Artificial Sequence
  Sense Oligo
uccagcaagugcuccacca

SEQ ID NO: 64248 - RNA, 19 nt, Artificial Sequence
  Antisense Oligo
ugguggagcacuugcugga

SEQ ID NO: 64249 - RNA, 19 nt, Artificial Sequence
  Sense Oligo
ccagcaagugcuccaccag

SEQ ID NO: 64250 - RNA, 19 nt, Artificial Sequence
  Antisense Oligo
cugguggagcacuugcugg

SEQ ID NO: 64251 - RNA, 19 nt, Artificial Sequence
  Sense Oligo
cagcaagugcuccaccagg

SEQ ID NO: 64252 - RNA, 19 nt, Artificial Sequence
  Antisense Oligo
ccugguggagcacuugcug

SEQ ID NO: 64253 - RNA, 19 nt, Artificial Sequence
  Sense Oligo
agcaagugcuccaccaggc

SEQ ID NO: 64254 - RNA, 19 nt, Artificial Sequence
  Antisense Oligo
gccugguggagcacuugcu

SEQ ID NO: 64255 - RNA, 19 nt, Artificial Sequence
  Sense Oligo
gcaagugcuccaccaggcu

SEQ ID NO: 64256 - RNA, 19 nt, Artificial Sequence
  Antisense Oligo
agccugguggagcacuugc

SEQ ID NO: 64257 - RNA, 19 nt, Artificial Sequence
  Sense Oligo
caagugcuccaccaggcug

SEQ ID NO: 64258 - RNA, 19 nt, Artificial Sequence
  Antisense Oligo
cagccugguggagcacuug

SEQ ID NO: 64259 - RNA, 19 nt, Artificial Sequence
  Sense Oligo
aagugcuccaccaggcugc

SEQ ID NO: 64260 - RNA, 19 nt, Artificial Sequence
  Antisense Oligo
gcagccugguggagcacuu

SEQ ID NO: 64261 - RNA, 19 nt, Artificial Sequence
  Sense Oligo
ccugcucaggugcuccaca

SEQ ID NO: 64262 - RNA, 19 nt, Artificial Sequence
  Antisense Oligo
uguggagcaccugagcagg

SEQ ID NO: 64263 - RNA, 19 nt, Artificial Sequence
  Sense Oligo
caggugcuccacagcccau

SEQ ID NO: 64264 - RNA, 19 nt, Artificial Sequence
  Antisense Oligo
augggcuguggagcaccug

SEQ ID NO: 64265 - RNA, 19 nt, Artificial Sequence
  Sense Oligo
aggugcuccacagcccaua

SEQ ID NO: 64266 - RNA, 19 nt, Artificial Sequence
  Antisense Oligo
uaugggcuguggagcaccu

SEQ ID NO: 64267 - RNA, 19 nt, Artificial Sequence
  Sense Oligo
ggugcuccacagcccauaa

SEQ ID NO: 64268 - RNA, 19 nt, Artificial Sequence
  Antisense Oligo
uuaugggcuguggagcacc

SEQ ID NO: 64269 - RNA, 19 nt, Artificial Sequence
  Sense Oligo
gugcuccacagcccauaaa

SEQ ID NO: 64270 - RNA, 19 nt, Artificial Sequence
  Antisense Oligo
uuuaugggcuguggagcac

SEQ ID NO: 64271 - RNA, 19 nt, Artificial Sequence
  Sense Oligo
ugcuccacagcccauaaaa

SEQ ID NO: 64272 - RNA, 19 nt, Artificial Sequence
  Antisense Oligo
uuuuaugggcuguggagca

SEQ ID NO: 64273 - RNA, 19 nt, Artificial Sequence
  Sense Oligo
caguauuccuucaugauca

SEQ ID NO: 64274 - RNA, 19 nt, Artificial Sequence
  Antisense Oligo
ugaucaugaaggaauacug

SEQ ID NO: 64275 - RNA, 19 nt, Artificial Sequence
  Sense Oligo
aguauuccuucaugaucac

SEQ ID NO: 64276 - RNA, 19 nt, Artificial Sequence
  Antisense Oligo
gugaucaugaaggaauacu

SEQ ID NO: 64277 - RNA, 19 nt, Artificial Sequence
  Sense Oligo
guauuccuucaugaucacu

SEQ ID NO: 64278 - RNA, 19 nt, Artificial Sequence
  Antisense Oligo
agugaucaugaaggaauac

SEQ ID NO: 64279 - RNA, 19 nt, Artificial Sequence
  Sense Oligo
uauuccuucaugaucacug

SEQ ID NO: 64280 - RNA, 19 nt, Artificial Sequence
  Antisense Oligo
cagugaucaugaaggaaua

SEQ ID NO: 64281 - RNA, 19 nt, Artificial Sequence
  Sense Oligo
auuccuucaugaucacugc

SEQ ID NO: 64282 - RNA, 19 nt, Artificial Sequence
  Antisense Oligo
gcagugaucaugaaggaau

SEQ ID NO: 64283 - RNA, 19 nt, Artificial Sequence
  Sense Oligo
uuccuucaugaucacugcu

SEQ ID NO: 64284 - RNA, 19 nt, Artificial Sequence
  Antisense Oligo
agcagugaucaugaaggaa

SEQ ID NO: 64285 - RNA, 19 nt, Artificial Sequence
  Sense Oligo
uccuucaugaucacugcua

SEQ ID NO: 64286 - RNA, 19 nt, Artificial Sequence
  Antisense Oligo
uagcagugaucaugaagga

SEQ ID NO: 64287 - RNA, 19 nt, Artificial Sequence
  Sense Oligo
ccuucaugaucacugcuac

SEQ ID NO: 64288 - RNA, 19 nt, Artificial Sequence
  Antisense Oligo
guagcagugaucaugaagg

SEQ ID NO: 64289 - RNA, 19 nt, Artificial Sequence
  Sense Oligo
cuucaugaucacugcuacc

SEQ ID NO: 64290 - RNA, 19 nt, Artificial Sequence
  Antisense Oligo
gguagcagugaucaugaag

SEQ ID NO: 64291 - RNA, 19 nt, Artificial Sequence
  Sense Oligo
augaucacugcuaccugug

SEQ ID NO: 64292 - RNA, 19 nt, Artificial Sequence
  Antisense Oligo
cacagguagcagugaucau

SEQ ID NO: 64293 - RNA, 19 nt, Artificial Sequence
  Sense Oligo
ugaucacugcuaccugugc

SEQ ID NO: 64294 - RNA, 19 nt, Artificial Sequence
  Antisense Oligo
gcacagguagcagugauca

SEQ ID NO: 64295 - RNA, 19 nt, Artificial Sequence
  Sense Oligo
ucacugcuaccugugcccu

SEQ ID NO: 64296 - RNA, 19 nt, Artificial Sequence
  Antisense Oligo
agggcacagguagcaguga

SEQ ID NO: 64297 - RNA, 19 nt, Artificial Sequence
  Sense Oligo
cacugcuaccugugcccug

SEQ ID NO: 64298 - RNA, 19 nt, Artificial Sequence
  Antisense Oligo
cagggcacagguagcagug

SEQ ID NO: 64299 - RNA, 19 nt, Artificial Sequence
  Sense Oligo
cugcuaccugugcccugaa

SEQ ID NO: 64300 - RNA, 19 nt, Artificial Sequence
  Antisense Oligo
uucagggcacagguagcag

SEQ ID NO: 64301 - RNA, 19 nt, Artificial Sequence
  Sense Oligo
ugcuaccugugcccugaag

SEQ ID NO: 64302 - RNA, 19 nt, Artificial Sequence
  Antisense Oligo
cuucagggcacagguagca

SEQ ID NO: 64303 - RNA, 19 nt, Artificial Sequence
  Sense Oligo
uaccugugcccugaagcgc

SEQ ID NO: 64304 - RNA, 19 nt, Artificial Sequence
  Antisense Oligo
gcgcuucagggcacaggua

SEQ ID NO: 64305 - RNA, 19 nt, Artificial Sequence
  Sense Oligo
accugugcccugaagcgca

SEQ ID NO: 64306 - RNA, 19 nt, Artificial Sequence
  Antisense Oligo
ugcgcuucagggcacaggu

SEQ ID NO: 64307 - RNA, 19 nt, Artificial Sequence
  Sense Oligo
ccugugcccugaagcgcaa

SEQ ID NO: 64308 - RNA, 19 nt, Artificial Sequence
  Antisense Oligo
uugcgcuucagggcacagg

SEQ ID NO: 64309 - RNA, 19 nt, Artificial Sequence
  Sense Oligo
cugugcccugaagcgcaac

SEQ ID NO: 64310 - RNA, 19 nt, Artificial Sequence
  Antisense Oligo
guugcgcuucagggcacag

SEQ ID NO: 64311 - RNA, 19 nt, Artificial Sequence
  Sense Oligo
acccagaggacagccacuu

SEQ ID NO: 64312 - RNA, 19 nt, Artificial Sequence
  Antisense Oligo
aaguggcuguccucugggu

SEQ ID NO: 64313 - RNA, 19 nt, Artificial Sequence
  Sense Oligo
cccagaggacagccacuuc

SEQ ID NO: 64314 - RNA, 19 nt, Artificial Sequence
  Antisense Oligo
gaaguggcuguccucuggg

SEQ ID NO: 64315 - RNA, 19 nt, Artificial Sequence
  Sense Oligo
ccagaggacagccacuucc

SEQ ID NO: 64316 - RNA, 19 nt, Artificial Sequence
  Antisense Oligo
ggaaguggcuguccucugg

SEQ ID NO: 64317 - RNA, 19 nt, Artificial Sequence
  Sense Oligo
gacagccacuuccucagaa

SEQ ID NO: 64318 - RNA, 19 nt, Artificial Sequence
  Antisense Oligo
uucugaggaaguggcuguc

SEQ ID NO: 64319 - RNA, 19 nt, Artificial Sequence
  Sense Oligo
cccaucgccacagguccau

SEQ ID NO: 64320 - RNA, 19 nt, Artificial Sequence
  Antisense Oligo
auggaccuguggcgauggg

SEQ ID NO: 64321 - RNA, 19 nt, Artificial Sequence
  Sense Oligo
ucgccacagguccaugagu

SEQ ID NO: 64322 - RNA, 19 nt, Artificial Sequence
  Antisense Oligo
acucauggaccuguggcga

SEQ ID NO: 64323 - RNA, 19 nt, Artificial Sequence
  Sense Oligo
cgccacagguccaugagug

SEQ ID NO: 64324 - RNA, 19 nt, Artificial Sequence
  Antisense Oligo
cacucauggaccuguggcg

SEQ ID NO: 64325 - RNA, 19 nt, Artificial Sequence
  Sense Oligo
gccacagguccaugaguga

SEQ ID NO: 64326 - RNA, 19 nt, Artificial Sequence
  Antisense Oligo
ucacucauggaccuguggc

SEQ ID NO: 64327 - RNA, 19 nt, Artificial Sequence
  Sense Oligo
cagguccaugagugacucc

SEQ ID NO: 64328 - RNA, 19 nt, Artificial Sequence
  Antisense Oligo
ggagucacucauggaccug

SEQ ID NO: 64329 - RNA, 19 nt, Artificial Sequence
  Sense Oligo
agguccaugagugacuccu

SEQ ID NO: 64330 - RNA, 19 nt, Artificial Sequence
  Antisense Oligo
aggagucacucauggaccu

SEQ ID NO: 64331 - RNA, 19 nt, Artificial Sequence
  Sense Oligo
gguccaugagugacuccua

SEQ ID NO: 64332 - RNA, 19 nt, Artificial Sequence
  Antisense Oligo
uaggagucacucauggacc

SEQ ID NO: 64333 - RNA, 19 nt, Artificial Sequence
  Sense Oligo
guccaugagugacuccuaa

SEQ ID NO: 64334 - RNA, 19 nt, Artificial Sequence
  Antisense Oligo
uuaggagucacucauggac

SEQ ID NO: 64335 - RNA, 19 nt, Artificial Sequence
  Sense Oligo
uccaugagugacuccuaau

SEQ ID NO: 64336 - RNA, 19 nt, Artificial Sequence
  Antisense Oligo
auuaggagucacucaugga

SEQ ID NO: 64337 - RNA, 19 nt, Artificial Sequence
  Sense Oligo
ccaugagugacuccuaauu

SEQ ID NO: 64338 - RNA, 19 nt, Artificial Sequence
  Antisense Oligo
aauuaggagucacucaugg

SEQ ID NO: 64339 - RNA, 19 nt, Artificial Sequence
  Sense Oligo
caugagugacuccuaauua

SEQ ID NO: 64340 - RNA, 19 nt, Artificial Sequence
  Antisense Oligo
uaauuaggagucacucaug

SEQ ID NO: 64341 - RNA, 19 nt, Artificial Sequence
  Sense Oligo
augagugacuccuaauuac

SEQ ID NO: 64342 - RNA, 19 nt, Artificial Sequence
  Antisense Oligo
guaauuaggagucacucau

SEQ ID NO: 64343 - RNA, 19 nt, Artificial Sequence
  Sense Oligo
ugagugacuccuaauuacc

SEQ ID NO: 64344 - RNA, 19 nt, Artificial Sequence
  Antisense Oligo
gguaauuaggagucacuca

SEQ ID NO: 64345 - RNA, 19 nt, Artificial Sequence
  Sense Oligo
gagugacuccuaauuacca

SEQ ID NO: 64346 - RNA, 19 nt, Artificial Sequence
  Antisense Oligo
ugguaauuaggagucacuc

SEQ ID NO: 64347 - RNA, 19 nt, Artificial Sequence
  Sense Oligo
agugacuccuaauuaccaa

SEQ ID NO: 64348 - RNA, 19 nt, Artificial Sequence
  Antisense Oligo
uugguaauuaggagucacu

SEQ ID NO: 64349 - RNA, 19 nt, Artificial Sequence
  Sense Oligo
ugacuccuaauuaccaaau

SEQ ID NO: 64350 - RNA, 19 nt, Artificial Sequence
  Antisense Oligo
auuugguaauuaggaguca

SEQ ID NO: 64351 - RNA, 19 nt, Artificial Sequence
  Sense Oligo
gacuccuaauuaccaaauc

SEQ ID NO: 64352 - RNA, 19 nt, Artificial Sequence
  Antisense Oligo
gauuugguaauuaggaguc

SEQ ID NO: 64353 - RNA, 19 nt, Artificial Sequence
  Sense Oligo
cacccugaccacucuggaa

SEQ ID NO: 64354 - RNA, 19 nt, Artificial Sequence
  Antisense Oligo
uuccagaguggucagggug

SEQ ID NO: 64355 - RNA, 19 nt, Artificial Sequence
  Sense Oligo
gacaggccugaaugugggu

SEQ ID NO: 64356 - RNA, 19 nt, Artificial Sequence
  Antisense Oligo
acccacauucaggccuguc

SEQ ID NO: 64357 - RNA, 19 nt, Artificial Sequence
  Sense Oligo
acaggccugaauguggguc

SEQ ID NO: 64358 - RNA, 19 nt, Artificial Sequence
  Antisense Oligo
gacccacauucaggccugu

SEQ ID NO: 64359 - RNA, 19 nt, Artificial Sequence
  Sense Oligo
ugaauguggguccuggcuc

SEQ ID NO: 64360 - RNA, 19 nt, Artificial Sequence
  Antisense Oligo
gagccaggacccacauuca

SEQ ID NO: 64361 - RNA, 19 nt, Artificial Sequence
  Sense Oligo
gaauguggguccuggcucu

SEQ ID NO: 64362 - RNA, 19 nt, Artificial Sequence
  Antisense Oligo
agagccaggacccacauuc

SEQ ID NO: 64363 - RNA, 19 nt, Artificial Sequence
  Sense Oligo
aauguggguccuggcucuc

SEQ ID NO: 64364 - RNA, 19 nt, Artificial Sequence
  Antisense Oligo
gagagccaggacccacauu

SEQ ID NO: 64365 - RNA, 19 nt, Artificial Sequence
  Sense Oligo
gguccuggcucucccauuu

SEQ ID NO: 64366 - RNA, 19 nt, Artificial Sequence
  Antisense Oligo
aaaugggagagccaggacc

SEQ ID NO: 64367 - RNA, 19 nt, Artificial Sequence
  Sense Oligo
ccuggcucucccauuugcc

SEQ ID NO: 64368 - RNA, 19 nt, Artificial Sequence
  Antisense Oligo
ggcaaaugggagagccagg

SEQ ID NO: 64369 - RNA, 19 nt, Artificial Sequence
  Sense Oligo
ucucccauuugccaguucu

SEQ ID NO: 64370 - RNA, 19 nt, Artificial Sequence
  Antisense Oligo
agaacuggcaaaugggaga

SEQ ID NO: 64371 - RNA, 19 nt, Artificial Sequence
  Sense Oligo
cucccauuugccaguucua

SEQ ID NO: 64372 - RNA, 19 nt, Artificial Sequence
  Antisense Oligo
uagaacuggcaaaugggag

SEQ ID NO: 64373 - RNA, 19 nt, Artificial Sequence
  Sense Oligo
ccauuugccaguucuacag

SEQ ID NO: 64374 - RNA, 19 nt, Artificial Sequence
  Antisense Oligo
cuguagaacuggcaaaugg

SEQ ID NO: 64375 - RNA, 19 nt, Artificial Sequence
  Sense Oligo
cauuugccaguucuacagc

SEQ ID NO: 64376 - RNA, 19 nt, Artificial Sequence
  Antisense Oligo
gcuguagaacuggcaaaug

SEQ ID NO: 64377 - RNA, 19 nt, Artificial Sequence
  Sense Oligo
ccaguucuacagccauggg

SEQ ID NO: 64378 - RNA, 19 nt, Artificial Sequence
  Antisense Oligo
cccauggcuguagaacugg

SEQ ID NO: 64379 - RNA, 19 nt, Artificial Sequence
  Sense Oligo
aguucuacagccaugggca

SEQ ID NO: 64380 - RNA, 19 nt, Artificial Sequence
  Antisense Oligo
ugcccauggcuguagaacu

SEQ ID NO: 64381 - RNA, 19 nt, Artificial Sequence
  Sense Oligo
guucuacagccaugggcaa

SEQ ID NO: 64382 - RNA, 19 nt, Artificial Sequence
  Antisense Oligo
uugcccauggcuguagaac

SEQ ID NO: 64383 - RNA, 19 nt, Artificial Sequence
  Sense Oligo
uucuacagccaugggcaag

SEQ ID NO: 64384 - RNA, 19 nt, Artificial Sequence
  Antisense Oligo
cuugcccauggcuguagaa

SEQ ID NO: 64385 - RNA, 19 nt, Artificial Sequence
  Sense Oligo
ucuacagccaugggcaagu

SEQ ID NO: 64386 - RNA, 19 nt, Artificial Sequence
  Antisense Oligo
acuugcccauggcuguaga

SEQ ID NO: 64387 - RNA, 19 nt, Artificial Sequence
  Sense Oligo
cuacagccaugggcaagug

SEQ ID NO: 64388 - RNA, 19 nt, Artificial Sequence
  Antisense Oligo
cacuugcccauggcuguag

SEQ ID NO: 64389 - RNA, 19 nt, Artificial Sequence
  Sense Oligo
uacagccaugggcaagugg

SEQ ID NO: 64390 - RNA, 19 nt, Artificial Sequence
  Antisense Oligo
ccacuugcccauggcugua

SEQ ID NO: 64391 - RNA, 19 nt, Artificial Sequence
  Sense Oligo
ccaugggcaaguggcucga

SEQ ID NO: 64392 - RNA, 19 nt, Artificial Sequence
  Antisense Oligo
ucgagccacuugcccaugg

SEQ ID NO: 64393 - RNA, 19 nt, Artificial Sequence
  Sense Oligo
caugggcaaguggcucgac

SEQ ID NO: 64394 - RNA, 19 nt, Artificial Sequence
  Antisense Oligo
gucgagccacuugcccaug

SEQ ID NO: 64395 - RNA, 19 nt, Artificial Sequence
  Sense Oligo
ggcaaguggcucgaccucu

SEQ ID NO: 64396 - RNA, 19 nt, Artificial Sequence
  Antisense Oligo
agaggucgagccacuugcc

SEQ ID NO: 64397 - RNA, 19 nt, Artificial Sequence
  Sense Oligo
gcaaguggcucgaccucuc

SEQ ID NO: 64398 - RNA, 19 nt, Artificial Sequence
  Antisense Oligo
gagaggucgagccacuugc

SEQ ID NO: 64399 - RNA, 19 nt, Artificial Sequence
  Sense Oligo
caaguggcucgaccucucu

SEQ ID NO: 64400 - RNA, 19 nt, Artificial Sequence
  Antisense Oligo
agagaggucgagccacuug

SEQ ID NO: 64401 - RNA, 19 nt, Artificial Sequence
  Sense Oligo
aaguggcucgaccucucua

SEQ ID NO: 64402 - RNA, 19 nt, Artificial Sequence
  Antisense Oligo
uagagaggucgagccacuu

SEQ ID NO: 64403 - RNA, 19 nt, Artificial Sequence
  Sense Oligo
aguggcucgaccucucuaa

SEQ ID NO: 64404 - RNA, 19 nt, Artificial Sequence
  Antisense Oligo
uuagagaggucgagccacu

SEQ ID NO: 64405 - RNA, 19 nt, Artificial Sequence
  Sense Oligo
guggcucgaccucucuaag

SEQ ID NO: 64406 - RNA, 19 nt, Artificial Sequence
  Antisense Oligo
cuuagagaggucgagccac

SEQ ID NO: 64407 - RNA, 19 nt, Artificial Sequence
  Sense Oligo
uggcucgaccucucuaagc

SEQ ID NO: 64408 - RNA, 19 nt, Artificial Sequence
  Antisense Oligo
gcuuagagaggucgagcca

SEQ ID NO: 64409 - RNA, 19 nt, Artificial Sequence
  Sense Oligo
auaucugucagugcucuua

SEQ ID NO: 64410 - RNA, 19 nt, Artificial Sequence
  Antisense Oligo
uaagagcacugacagauau

SEQ ID NO: 64411 - RNA, 19 nt, Artificial Sequence
  Sense Oligo
uaucugucagugcucuuaa

SEQ ID NO: 64412 - RNA, 19 nt, Artificial Sequence
  Antisense Oligo
uuaagagcacugacagaua

SEQ ID NO: 64413 - RNA, 19 nt, Artificial Sequence
  Sense Oligo
aucugucagugcucuuaag

SEQ ID NO: 64414 - RNA, 19 nt, Artificial Sequence
  Antisense Oligo
cuuaagagcacugacagau

SEQ ID NO: 64415 - RNA, 19 nt, Artificial Sequence
  Sense Oligo
ucugucagugcucuuaagg

SEQ ID NO: 64416 - RNA, 19 nt, Artificial Sequence
  Antisense Oligo
ccuuaagagcacugacaga

SEQ ID NO: 64417 - RNA, 19 nt, Artificial Sequence
  Sense Oligo
cugucagugcucuuaaggg

SEQ ID NO: 64418 - RNA, 19 nt, Artificial Sequence
  Antisense Oligo
cccuuaagagcacugacag

SEQ ID NO: 64419 - RNA, 19 nt, Artificial Sequence
  Sense Oligo
agugcucuuaagggaggag

SEQ ID NO: 64420 - RNA, 19 nt, Artificial Sequence
  Antisense Oligo
cuccucccuuaagagcacu

SEQ ID NO: 64421 - RNA, 19 nt, Artificial Sequence
  Sense Oligo
accuaaucagugaugcuau

SEQ ID NO: 64422 - RNA, 19 nt, Artificial Sequence
  Antisense Oligo
auagcaucacugauuaggu

SEQ ID NO: 64423 - RNA, 19 nt, Artificial Sequence
  Sense Oligo
ccuaaucagugaugcuauc

SEQ ID NO: 64424 - RNA, 19 nt, Artificial Sequence
  Antisense Oligo
gauagcaucacugauuagg

SEQ ID NO: 64425 - RNA, 19 nt, Artificial Sequence
  Sense Oligo
augagucuugccgaagcgc

SEQ ID NO: 64426 - RNA, 19 nt, Artificial Sequence
  Antisense Oligo
gcgcuucggcaagacucau

SEQ ID NO: 64427 - RNA, 19 nt, Artificial Sequence
  Sense Oligo
agcccuucuuuaacucgug

SEQ ID NO: 64428 - RNA, 19 nt, Artificial Sequence
  Antisense Oligo
cacgaguuaaagaagggcu

SEQ ID NO: 64429 - RNA, 19 nt, Artificial Sequence
  Sense Oligo
gcccuucuuuaacucgugu

SEQ ID NO: 64430 - RNA, 19 nt, Artificial Sequence
  Antisense Oligo
acacgaguuaaagaagggc

SEQ ID NO: 64431 - RNA, 19 nt, Artificial Sequence
  Sense Oligo
cccuucuuuaacucguguc

SEQ ID NO: 64432 - RNA, 19 nt, Artificial Sequence
  Antisense Oligo
gacacgaguuaaagaaggg

SEQ ID NO: 64433 - RNA, 19 nt, Artificial Sequence
  Sense Oligo
cuucuuuaacucgugucug

SEQ ID NO: 64434 - RNA, 19 nt, Artificial Sequence
  Antisense Oligo
cagacacgaguuaaagaag

SEQ ID NO: 64435 - RNA, 19 nt, Artificial Sequence
  Sense Oligo
uucuuuaacucgugucuga

SEQ ID NO: 64436 - RNA, 19 nt, Artificial Sequence
  Antisense Oligo
ucagacacgaguuaaagaa

SEQ ID NO: 64437 - RNA, 19 nt, Artificial Sequence
  Sense Oligo
uuucucugcagcuuguccu

SEQ ID NO: 64438 - RNA, 19 nt, Artificial Sequence
  Antisense Oligo
aggacaagcugcagagaaa

SEQ ID NO: 64439 - RNA, 19 nt, Artificial Sequence
  Sense Oligo
cccugaccaggaaucuagg

SEQ ID NO: 64440 - RNA, 19 nt, Artificial Sequence
  Antisense Oligo
ccuagauuccuggucaggg

SEQ ID NO: 64441 - RNA, 19 nt, Artificial Sequence
  Sense Oligo
ccugaccaggaaucuaggu

SEQ ID NO: 64442 - RNA, 19 nt, Artificial Sequence
  Antisense Oligo
accuagauuccuggucagg

SEQ ID NO: 64443 - RNA, 19 nt, Artificial Sequence
  Sense Oligo
cugaccaggaaucuaggug

SEQ ID NO: 64444 - RNA, 19 nt, Artificial Sequence
  Antisense Oligo
caccuagauuccuggucag

SEQ ID NO: 64445 - RNA, 19 nt, Artificial Sequence
  Sense Oligo
ugaccaggaaucuagguga

SEQ ID NO: 64446 - RNA, 19 nt, Artificial Sequence
  Antisense Oligo
ucaccuagauuccugguca

SEQ ID NO: 64447 - RNA, 19 nt, Artificial Sequence
  Sense Oligo
gaccaggaaucuaggugau

SEQ ID NO: 64448 - RNA, 19 nt, Artificial Sequence
  Antisense Oligo
aucaccuagauuccugguc

SEQ ID NO: 64449 - RNA, 19 nt, Artificial Sequence
  Sense Oligo
aucuaggugauuaauggau

SEQ ID NO: 64450 - RNA, 19 nt, Artificial Sequence
  Antisense Oligo
auccauuaaucaccuagau

SEQ ID NO: 64451 - RNA, 19 nt, Artificial Sequence
  Sense Oligo
ucuaggugauuaauggaug

SEQ ID NO: 64452 - RNA, 19 nt, Artificial Sequence
  Antisense Oligo
cauccauuaaucaccuaga

SEQ ID NO: 64453 - RNA, 19 nt, Artificial Sequence
  Sense Oligo
gauuaauggaugguugagg

SEQ ID NO: 64454 - RNA, 19 nt, Artificial Sequence
  Antisense Oligo
ccucaaccauccauuaauc

SEQ ID NO: 64455 - RNA, 19 nt, Artificial Sequence
  Sense Oligo
ccucagacggcuuaggccu

SEQ ID NO: 64456 - RNA, 19 nt, Artificial Sequence
  Antisense Oligo
aggccuaagccgucugagg

SEQ ID NO: 64457 - RNA, 19 nt, Artificial Sequence
  Sense Oligo
cucagacggcuuaggccug

SEQ ID NO: 64458 - RNA, 19 nt, Artificial Sequence
  Antisense Oligo
caggccuaagccgucugag

SEQ ID NO: 64459 - RNA, 19 nt, Artificial Sequence
  Sense Oligo
ucagacggcuuaggccugc

SEQ ID NO: 64460 - RNA, 19 nt, Artificial Sequence
  Antisense Oligo
gcaggccuaagccgucuga

SEQ ID NO: 64461 - RNA, 19 nt, Artificial Sequence
  Sense Oligo
ggagcaucccuguggagga

SEQ ID NO: 64462 - RNA, 19 nt, Artificial Sequence
  Antisense Oligo
uccuccacagggaugcucc

SEQ ID NO: 64463 - RNA, 19 nt, Artificial Sequence
  Sense Oligo
agcaucccuguggaggacu

SEQ ID NO: 64464 - RNA, 19 nt, Artificial Sequence
  Antisense Oligo
aguccuccacagggaugcu

SEQ ID NO: 64465 - RNA, 19 nt, Artificial Sequence
  Sense Oligo
cagccagcuugagcgacau

SEQ ID NO: 64466 - RNA, 19 nt, Artificial Sequence
  Antisense Oligo
augucgcucaagcuggcug

SEQ ID NO: 64467 - RNA, 19 nt, Artificial Sequence
  Sense Oligo
agccagcuugagcgacaug

SEQ ID NO: 64468 - RNA, 19 nt, Artificial Sequence
  Antisense Oligo
caugucgcucaagcuggcu

SEQ ID NO: 64469 - RNA, 19 nt, Artificial Sequence
  Sense Oligo
ccagcuugagcgacaugga

SEQ ID NO: 64470 - RNA, 19 nt, Artificial Sequence
  Antisense Oligo
uccaugucgcucaagcugg

SEQ ID NO: 64471 - RNA, 19 nt, Artificial Sequence
  Sense Oligo
cagcuugagcgacauggau

SEQ ID NO: 64472 - RNA, 19 nt, Artificial Sequence
  Antisense Oligo
auccaugucgcucaagcug

SEQ ID NO: 64473 - RNA, 19 nt, Artificial Sequence
  Sense Oligo
agcuugagcgacauggauc

SEQ ID NO: 64474 - RNA, 19 nt, Artificial Sequence
  Antisense Oligo
gauccaugucgcucaagcu

SEQ ID NO: 64475 - RNA, 19 nt, Artificial Sequence
  Sense Oligo
gcuugagcgacauggaucc

SEQ ID NO: 64476 - RNA, 19 nt, Artificial Sequence
  Antisense Oligo
ggauccaugucgcucaagc

SEQ ID NO: 64477 - RNA, 19 nt, Artificial Sequence
  Sense Oligo
cuugagcgacauggauccu

SEQ ID NO: 64478 - RNA, 19 nt, Artificial Sequence
  Antisense Oligo
aggauccaugucgcucaag

SEQ ID NO: 64479 - RNA, 19 nt, Artificial Sequence
  Sense Oligo
uugagcgacauggauccug

SEQ ID NO: 64480 - RNA, 19 nt, Artificial Sequence
  Antisense Oligo
caggauccaugucgcucaa

SEQ ID NO: 64481 - RNA, 19 nt, Artificial Sequence
  Sense Oligo
ugagcgacauggauccuga

SEQ ID NO: 64482 - RNA, 19 nt, Artificial Sequence
  Antisense Oligo
ucaggauccaugucgcuca

SEQ ID NO: 64483 - RNA, 19 nt, Artificial Sequence
  Sense Oligo
gcucucaggcaggcaauug

SEQ ID NO: 64484 - RNA, 19 nt, Artificial Sequence
  Antisense Oligo
caauugccugccugagagc

SEQ ID NO: 64485 - RNA, 19 nt, Artificial Sequence
  Sense Oligo
cucucaggcaggcaauugc

SEQ ID NO: 64486 - RNA, 19 nt, Artificial Sequence
  Antisense Oligo
gcaauugccugccugagag

SEQ ID NO: 64487 - RNA, 19 nt, Artificial Sequence
  Sense Oligo
caguggaaugccuggccag

SEQ ID NO: 64488 - RNA, 19 nt, Artificial Sequence
  Antisense Oligo
cuggccaggcauuccacug

SEQ ID NO: 64489 - RNA, 19 nt, Artificial Sequence
  Sense Oligo
aguggaaugccuggccaga

SEQ ID NO: 64490 - RNA, 19 nt, Artificial Sequence
  Antisense Oligo
ucuggccaggcauuccacu

SEQ ID NO: 64491 - RNA, 19 nt, Artificial Sequence
  Sense Oligo
agcaguguguagcaggccc

SEQ ID NO: 64492 - RNA, 19 nt, Artificial Sequence
  Antisense Oligo
gggccugcuacacacugcu

SEQ ID NO: 64493 - RNA, 19 nt, Artificial Sequence
  Sense Oligo
cccgaggaggaucaacgca

SEQ ID NO: 64494 - RNA, 19 nt, Artificial Sequence
  Antisense Oligo
ugcguugauccuccucggg

SEQ ID NO: 64495 - RNA, 19 nt, Artificial Sequence
  Sense Oligo
ccgaggaggaucaacgcag

SEQ ID NO: 64496 - RNA, 19 nt, Artificial Sequence
  Antisense Oligo
cugcguugauccuccucgg

SEQ ID NO: 64497 - RNA, 19 nt, Artificial Sequence
  Sense Oligo
aacugccacuuggagucca

SEQ ID NO: 64498 - RNA, 19 nt, Artificial Sequence
  Antisense Oligo
uggacuccaaguggcaguu

SEQ ID NO: 64499 - RNA, 19 nt, Artificial Sequence
  Sense Oligo
cuguacuggcacucugguu

SEQ ID NO: 64500 - RNA, 19 nt, Artificial Sequence
  Antisense Oligo
aaccagagugccaguacag

SEQ ID NO: 64501 - RNA, 19 nt, Artificial Sequence
  Sense Oligo
uguacuggcacucugguuu

SEQ ID NO: 64502 - RNA, 19 nt, Artificial Sequence
  Antisense Oligo
aaaccagagugccaguaca

SEQ ID NO: 64503 - RNA, 19 nt, Artificial Sequence
  Sense Oligo
guacuggcacucugguuuu

SEQ ID NO: 64504 - RNA, 19 nt, Artificial Sequence
  Antisense Oligo
aaaaccagagugccaguac

SEQ ID NO: 64505 - RNA, 19 nt, Artificial Sequence
  Sense Oligo
uuuguuuugugguaugcgu

SEQ ID NO: 64506 - RNA, 19 nt, Artificial Sequence
  Antisense Oligo
acgcauaccacaaaacaaa

SEQ ID NO: 64507 - RNA, 19 nt, Artificial Sequence
  Sense Oligo
uuguuuugugguaugcgug

SEQ ID NO: 64508 - RNA, 19 nt, Artificial Sequence
  Antisense Oligo
cacgcauaccacaaaacaa

SEQ ID NO: 64509 - RNA, 19 nt, Artificial Sequence
  Sense Oligo
uguuuugugguaugcgugu

SEQ ID NO: 64510 - RNA, 19 nt, Artificial Sequence
  Antisense Oligo
acacgcauaccacaaaaca

SEQ ID NO: 64511 - RNA, 19 nt, Artificial Sequence
  Sense Oligo
guuuugugguaugcgugua

SEQ ID NO: 64512 - RNA, 19 nt, Artificial Sequence
  Antisense Oligo
uacacgcauaccacaaaac

SEQ ID NO: 64513 - RNA, 19 nt, Artificial Sequence
  Sense Oligo
uuuugugguaugcguguag

SEQ ID NO: 64514 - RNA, 19 nt, Artificial Sequence
  Antisense Oligo
cuacacgcauaccacaaaa

SEQ ID NO: 64515 - RNA, 19 nt, Artificial Sequence
  Sense Oligo
uuugugguaugcguguagg

SEQ ID NO: 64516 - RNA, 19 nt, Artificial Sequence
  Antisense Oligo
ccuacacgcauaccacaaa

SEQ ID NO: 64517 - RNA, 19 nt, Artificial Sequence
  Sense Oligo
uugugguaugcguguaggg

SEQ ID NO: 64518 - RNA, 19 nt, Artificial Sequence
  Antisense Oligo
cccuacacgcauaccacaa

SEQ ID NO: 64519 - RNA, 19 nt, Artificial Sequence
  Sense Oligo
ugugguaugcguguagggu

SEQ ID NO: 64520 - RNA, 19 nt, Artificial Sequence
  Antisense Oligo
acccuacacgcauaccaca

SEQ ID NO: 64521 - RNA, 19 nt, Artificial Sequence
  Sense Oligo
guaugcguguagggugagc

SEQ ID NO: 64522 - RNA, 19 nt, Artificial Sequence
  Antisense Oligo
gcucacccuacacgcauac

SEQ ID NO: 64523 - RNA, 19 nt, Artificial Sequence
  Sense Oligo
uaugcguguagggugagcg

SEQ ID NO: 64524 - RNA, 19 nt, Artificial Sequence
  Antisense Oligo
cgcucacccuacacgcaua

SEQ ID NO: 64525 - RNA, 19 nt, Artificial Sequence
  Sense Oligo
augcguguagggugagcgu

SEQ ID NO: 64526 - RNA, 19 nt, Artificial Sequence
  Antisense Oligo
acgcucacccuacacgcau

SEQ ID NO: 64527 - RNA, 19 nt, Artificial Sequence
  Sense Oligo
ugcguguagggugagcgua

SEQ ID NO: 64528 - RNA, 19 nt, Artificial Sequence
  Antisense Oligo
uacgcucacccuacacgca

SEQ ID NO: 64529 - RNA, 19 nt, Artificial Sequence
  Sense Oligo
gcguguagggugagcguaa

SEQ ID NO: 64530 - RNA, 19 nt, Artificial Sequence
  Antisense Oligo
uuacgcucacccuacacgc

SEQ ID NO: 64531 - RNA, 19 nt, Artificial Sequence
  Sense Oligo
cguguagggugagcguaau

SEQ ID NO: 64532 - RNA, 19 nt, Artificial Sequence
  Antisense Oligo
auuacgcucacccuacacg

SEQ ID NO: 64533 - RNA, 19 nt, Artificial Sequence
  Sense Oligo
guguagggugagcguaaug

SEQ ID NO: 64534 - RNA, 19 nt, Artificial Sequence
  Antisense Oligo
cauuacgcucacccuacac

SEQ ID NO: 64535 - RNA, 19 nt, Artificial Sequence
  Sense Oligo
gggugagcguaauguuuug

SEQ ID NO: 64536 - RNA, 19 nt, Artificial Sequence
  Antisense Oligo
caaaacauuacgcucaccc

SEQ ID NO: 64537 - RNA, 19 nt, Artificial Sequence
  Sense Oligo
ggugagcguaauguuuugu

SEQ ID NO: 64538 - RNA, 19 nt, Artificial Sequence
  Antisense Oligo
acaaaacauuacgcucacc

SEQ ID NO: 64539 - RNA, 19 nt, Artificial Sequence
  Sense Oligo
gugagcguaauguuuuguc

SEQ ID NO: 64540 - RNA, 19 nt, Artificial Sequence
  Antisense Oligo
gacaaaacauuacgcucac

SEQ ID NO: 64541 - RNA, 19 nt, Artificial Sequence
  Sense Oligo
ugagcguaauguuuugucu

SEQ ID NO: 64542 - RNA, 19 nt, Artificial Sequence
  Antisense Oligo
agacaaaacauuacgcuca

SEQ ID NO: 64543 - RNA, 19 nt, Artificial Sequence
  Sense Oligo
gagcguaauguuuugucuu

SEQ ID NO: 64544 - RNA, 19 nt, Artificial Sequence
  Antisense Oligo
aagacaaaacauuacgcuc

SEQ ID NO: 64545 - RNA, 19 nt, Artificial Sequence
  Sense Oligo
agcguaauguuuugucuug

SEQ ID NO: 64546 - RNA, 19 nt, Artificial Sequence
  Antisense Oligo
caagacaaaacauuacgcu

SEQ ID NO: 64547 - RNA, 19 nt, Artificial Sequence
  Sense Oligo
gcguaauguuuugucuuga

SEQ ID NO: 64548 - RNA, 19 nt, Artificial Sequence
  Antisense Oligo
ucaagacaaaacauuacgc

SEQ ID NO: 64549 - RNA, 19 nt, Artificial Sequence
  Sense Oligo
cguaauguuuugucuugaa

SEQ ID NO: 64550 - RNA, 19 nt, Artificial Sequence
  Antisense Oligo
uucaagacaaaacauuacg

SEQ ID NO: 64551 - RNA, 19 nt, Artificial Sequence
  Sense Oligo
guaauguuuugucuugaag

SEQ ID NO: 64552 - RNA, 19 nt, Artificial Sequence
  Antisense Oligo
cuucaagacaaaacauuac

SEQ ID NO: 64553 - RNA, 19 nt, Artificial Sequence
  Sense Oligo
aagaagcaugggucaagca

SEQ ID NO: 64554 - RNA, 19 nt, Artificial Sequence
  Antisense Oligo
ugcuugacccaugcuucuu

SEQ ID NO: 64555 - RNA, 19 nt, Artificial Sequence
  Sense Oligo
agaagcaugggucaagcac

SEQ ID NO: 64556 - RNA, 19 nt, Artificial Sequence
  Antisense Oligo
gugcuugacccaugcuucu

SEQ ID NO: 64557 - RNA, 19 nt, Artificial Sequence
  Sense Oligo
agguuggccaucagaguga

SEQ ID NO: 64558 - RNA, 19 nt, Artificial Sequence
  Antisense Oligo
ucacucugauggccaaccu

SEQ ID NO: 64559 - RNA, 19 nt, Artificial Sequence
  Sense Oligo
gguuggccaucagagugaa

SEQ ID NO: 64560 - RNA, 19 nt, Artificial Sequence
  Antisense Oligo
uucacucugauggccaacc

SEQ ID NO: 64561 - RNA, 19 nt, Artificial Sequence
  Sense Oligo
guuggccaucagagugaag

SEQ ID NO: 64562 - RNA, 19 nt, Artificial Sequence
  Antisense Oligo
cuucacucugauggccaac

SEQ ID NO: 64563 - RNA, 19 nt, Artificial Sequence
  Sense Oligo
uuggccaucagagugaagc

SEQ ID NO: 64564 - RNA, 19 nt, Artificial Sequence
  Antisense Oligo
gcuucacucugauggccaa

SEQ ID NO: 64565 - RNA, 19 nt, Artificial Sequence
  Sense Oligo
uggccaucagagugaagcc

SEQ ID NO: 64566 - RNA, 19 nt, Artificial Sequence
  Antisense Oligo
ggcuucacucugauggcca

SEQ ID NO: 64567 - RNA, 19 nt, Artificial Sequence
  Sense Oligo
ggccaucagagugaagccu

SEQ ID NO: 64568 - RNA, 19 nt, Artificial Sequence
  Antisense Oligo
aggcuucacucugauggcc

SEQ ID NO: 64569 - RNA, 19 nt, Artificial Sequence
  Sense Oligo
agagugaagccuggacagg

SEQ ID NO: 64570 - RNA, 19 nt, Artificial Sequence
  Antisense Oligo
ccuguccaggcuucacucu

SEQ ID NO: 64571 - RNA, 19 nt, Artificial Sequence
  Sense Oligo
agugaagccuggacagguc

SEQ ID NO: 64572 - RNA, 19 nt, Artificial Sequence
  Antisense Oligo
gaccuguccaggcuucacu

SEQ ID NO: 64573 - RNA, 19 nt, Artificial Sequence
  Sense Oligo
gugaagccuggacaggucc

SEQ ID NO: 64574 - RNA, 19 nt, Artificial Sequence
  Antisense Oligo
ggaccuguccaggcuucac

SEQ ID NO: 64575 - RNA, 19 nt, Artificial Sequence
  Sense Oligo
ccaggguacccacaccagu

SEQ ID NO: 64576 - RNA, 19 nt, Artificial Sequence
  Antisense Oligo
acugguguggguacccugg

SEQ ID NO: 64577 - RNA, 19 nt, Artificial Sequence
  Sense Oligo
aggguacccacaccaguuc

SEQ ID NO: 64578 - RNA, 19 nt, Artificial Sequence
  Antisense Oligo
gaacugguguggguacccu

SEQ ID NO: 64579 - RNA, 19 nt, Artificial Sequence
  Sense Oligo
ggguacccacaccaguucc

SEQ ID NO: 64580 - RNA, 19 nt, Artificial Sequence
  Antisense Oligo
ggaacugguguggguaccc

SEQ ID NO: 64581 - RNA, 19 nt, Artificial Sequence
  Sense Oligo
acccacaccaguucccgua

SEQ ID NO: 64582 - RNA, 19 nt, Artificial Sequence
  Antisense Oligo
uacgggaacuggugugggu

SEQ ID NO: 64583 - RNA, 19 nt, Artificial Sequence
  Sense Oligo
cccacaccaguucccguac

SEQ ID NO: 64584 - RNA, 19 nt, Artificial Sequence
  Antisense Oligo
guacgggaacugguguggg

SEQ ID NO: 64585 - RNA, 19 nt, Artificial Sequence
  Sense Oligo
ccacaccaguucccguaca

SEQ ID NO: 64586 - RNA, 19 nt, Artificial Sequence
  Antisense Oligo
uguacgggaacuggugugg

SEQ ID NO: 64587 - RNA, 19 nt, Artificial Sequence
  Sense Oligo
cacaccaguucccguacac

SEQ ID NO: 64588 - RNA, 19 nt, Artificial Sequence
  Antisense Oligo
guguacgggaacuggugug
